(19) United States
(12) Patent Application Publication
(10) Pub. No.: US 2025/0179488 A1
(43) Pub. Date: Jun. 5, 2025

(54) SYSTEMS AND METHODS FOR THE TREATMENT OF HEMOGLOBINOPATHIES

(71) Applicant: EDITAS MEDICINE, INC., Cambridge, MA (US)

(72) Inventors: Jennifer Leah GORI, Jamaica Plain, MA (US); Edouard AUPEPIN DE LAMOTHE-DREUZY, Boston, MA (US); Jack HEATH, Winchester, MA (US); John Anthony ZURIS, Boston, MA (US); KaiHsin CHANG, Medfield, MA (US)

(73) Assignee: EDITAS MEDICINE, INC., Cambridge, MA (US)

(21) Appl. No.: 18/763,794

(22) Filed: Jul. 3, 2024

Related U.S. Application Data
(63) Continuation of application No. 17/019,154, filed on Sep. 11, 2020, now Pat. No. 12,031,132.
Application No. 17/019,154 is a continuation of application No. PCT/US2019/022374, filed on Mar. 14, 2019.
(60) Provisional application No. 62/643,168, filed on Mar. 14, 2018.
(60) Provisional application No. 62/767,488, filed on Nov. 14, 2018.
(60) Provisional application No. 62/773,073, filed on Nov. 29, 2018.

(51) Int. Cl. C12N 15/113; A61K 9/00

(52) U.S. Cl. CPC C12N 15/113; A61K 9/0009; C12N 2310/313

(57) ABSTRACT

Genome editing systems, guide RNAs, and CRISPR-mediated methods are provided for altering portions of the HBG1 and HBG2 loci, portions of the erythroid specific enhancer of the BCL11A gene, or a combination thereof, in cells and increasing expression of fetal hemoglobin.

### REFERENCE TO RELATED APPLICATIONS

[0001] The present application is a continuation of U.S. application Ser. No. 17/019,154, filed Sep. 11, 2020, which is a continuation of International Application No. PCT/US2019/022374, filed Mar. 14, 2019, which claims the benefit of United States Provisional Application Nos. 62/643,168, filed Mar. 14, 2018, 62/767,488, filed Nov. 14, 2018, and 62/773,073, filed Nov. 29, 2018, the contents of which are hereby incorporated by reference in their entirety.

### SEQUENCE LISTING

[0002] This application contains a ST.26 compliant Sequence Listing, which was submitted in XML format via Patent Center, and is hereby incorporated by reference in its entirety. The XML copy, created on Jun. 26, 2024, is named 1189458013US15.xml and is 19,000 bytes in size.

### FIELD

[0003] This disclosure relates to genome editing systems and methods for altering a target nucleic acid sequence, or modulating expression of a target nucleic acid sequence, and applications thereof in connection with the alteration of genes encoding hemoglobin subunits and/or treatment of hemoglobinopathies.

### BACKGROUND

[0004] Hemoglobin (Hb) carries oxygen in erythrocytes or red blood cells (RBCs) from the lungs to tissues. During prenatal development and until shortly after birth, hemoglobin is present in the form of fetal hemoglobin (HbF), a tetrameric protein composed of two alpha (α)-globin chains and two gamma (γ)-globin chains. HbF is largely replaced by adult hemoglobin (HbA), a tetrameric protein in which the γ-globin chains of HbF are replaced with beta (β)-globin chains, through a process known as globin switching. The average adult makes less than 1% HbF out of total hemoglobin (Thein 2009). The α-hemoglobin gene is located on chromosome 16, while the β-hemoglobin gene (HBB), A gamma (Aγ)-globin chain (HBG1, also known as gamma globin A), and G gamma (Gγ)-globin chain (HBG2, also known as gamma globin G) are located on chromosome 11 within the globin gene cluster (also referred to as the globin locus).

[0005] Mutations in HBB can cause hemoglobin disorders (i.e., hemoglobinopathies) including sickle cell disease (SCD) and beta-thalassemia (β-Thal). Approximately 93,000 people in the United States are diagnosed with a hemoglobinopathy. Worldwide, 300,000 children are born with hemoglobinopathies every year (Angastiniotis 1998). Because these conditions are associated with HBB mutations, their symptoms typically do not manifest until after globin switching from HbF to HbA.

[0006] SCD is the most common inherited hematologic disease in the United States, affecting approximately 80,000 people (Brousseau 2010). SCD is most common in people of African ancestry, for whom the prevalence of SCD is 1 in 500. In Africa, the prevalence of SCD is 15 million (Aliyu 2008). SCD is also more common in people of Indian, Saudi Arabian and Mediterranean descent. In those of Hispanic-American descent, the prevalence of sickle cell disease is 1 in 1,000 (Lewis 2014).

[0007] SCD is caused by a single homozygous mutation in the HBB gene, c.17A>T (HbS mutation). The sickle mutation is a point mutation (GAG>GTG) on HBB that results in substitution of valine for glutamic acid at amino acid position 6 in exon 1. The valine at position 6 of the β-hemoglobin chain is hydrophobic and causes a change in conformation of the β-globin protein when it is not bound to oxygen. This change of conformation causes HbS proteins to polymerize in the absence of oxygen, leading to deformation (i.e., sickling) of RBCs. SCD is inherited in an autosomal recessive manner, so that only patients with two HbS alleles have the disease. Heterozygous subjects have sickle cell trait, and may suffer from anemia and/or painful crises if they are severely dehydrated or oxygen deprived.

[0008] Sickle shaped RBCs cause multiple symptoms, including anemia, sickle cell crises, vaso-occlusive crises, aplastic crises, and acute chest syndrome. Sickle shaped RBCs are less elastic than wild-type RBCs and therefore cannot pass as easily through capillary beds and cause occlusion and ischemia (i.e., vaso-occlusion). Vaso-occlusive crisis occurs when sickle cells obstruct blood flow in the capillary bed of an organ leading to pain, ischemia, and necrosis. These episodes typically last 5-7 days. The spleen plays a role in clearing dysfunctional RBCs, and is therefore typically enlarged during early childhood and subject to frequent vaso-occlusive crises. By the end of childhood, the spleen in SCD patients is often infarcted, which leads to autosplenectomy. Hemolysis is a constant feature of SCD and causes anemia. Sickle cells survive for 10-20 days in circulation, while healthy RBCs survive for 90-120 days. SCD subjects are transfused as necessary to maintain adequate hemoglobin levels. Frequent transfusions place subjects at risk for infection with HIV, Hepatitis B, and Hepatitis C. Subjects may also suffer from acute chest crises and infarcts of extremities, end organs, and the central nervous system.

[0009] Subjects with SCD have decreased life expectancies. The prognosis for patients with SCD is steadily improving with careful, life-long management of crises and anemia. As of 2001, the average life expectancy of subjects with sickle cell disease was the mid-to-late 50's. Current treatments for SCD involve hydration and pain management during crises, and transfusions as needed to correct anemia.

[0010] Thalassemias (e.g., β-Thal, δ-Thal, and β/δ-Thal) cause chronic anemia. β-Thal is estimated to affect approximately 1 in 100,000 people worldwide. Its prevalence is higher in certain populations, including those of European descent, where its prevalence is approximately 1 in 10,000. β-Thal major, the more severe form of the disease, is life-threatening unless treated with lifelong blood transfusions and chelation therapy. In the United States, there are approximately 3,000 subjects with β-Thal major. β-Thal intermedia does not require blood transfusions, but it may cause growth delay and significant systemic abnormalities, and it frequently requires lifelong chelation therapy. Although HbA makes up the majority of hemoglobin in adult RBCs, approximately 3% of adult hemoglobin is in the form of HbA2, an HbA variant in which the two γ-globin chains are replaced with two delta (Δ)-globin chains. δ-Thal is associated with mutations in the A hemoglobin gene (HBD) that cause a loss of HBD expression. Co-inheritance of the HBD mutation can mask a diagnosis of β-Thal (i.e., β/δ-Thal) by decreasing the level of HbA2 to the normal range (Bouva 2006). β/δ-Thal is usually caused by deletion of the HBB and HBD sequences in both alleles. In homozygous (δo/δo βo/βo) patients, HBG is expressed, leading to production of HbF alone.

[0011] Like SCD, β-Thal is caused by mutations in the HBB gene. The most common HBB mutations leading to β-Thal are: c.-136C>G, c.92+1G>A, c.92+6T>C, c.93-21G>A, c.118C>T, c.316-106C>G, c.25_26delAA, c.27_28insG, c.92+5G>C, c.118C>T, c.135delC, c.315+1G>A, c.-78A>G, c.52A>T, c.59A>G, c.92+5G>C, c.124_127delTTCT, c.316-197C>T, c.-78A>G, c.52A>T, c.124_127delTTCT, c.316-197C>T, c.-138C>T, c.-79A>G, c.92+5G>C, c.75T>A, c.316-2A>G, and c.316-2A>C. These and other mutations associated with β-Thal cause mutated or absent β-globin chains, which causes a disruption of the normal Hb α-hemoglobin to β-hemoglobin ratio. Excess α-globin chains precipitate in erythroid precursors in the bone marrow.

[0012] In β-Thal major, both alleles of HBB contain nonsense, frameshift, or splicing mutations that leads to complete absence of β-globin production (denoted β⁰/β⁰). β-Thal major results in severe reduction in β-globin chains, leading to significant precipitation of α-globin chains in RBCs and more severe anemia.

[0013] β-Thal intermedia results from mutations in the 5′ or 3′ untranslated region of HBB, mutations in the promoter region or polyadenylation signal of HBB, or splicing mutations within the HBB gene. Patient genotypes are denoted βo/β+or β+/β+. Bo represents absent expression of a β-globin chain; β+ represents a dysfunctional but present β-globin chain. Phenotypic expression varies among patients. Since there is some production of β-globin, β-Thal intermedia results in less precipitation of α-globin chains in the erythroid precursors and less severe anemia than β-Thal major. However, there are more significant consequences of erythroid lineage expansion secondary to chronic anemia.

[0014] Subjects with β-Thal major present between the ages of 6 months and 2 years, and suffer from failure to thrive, fevers, hepatosplenomegaly, and diarrhea. Adequate treatment includes regular transfusions. Therapy for β-Thal major also includes splenectomy and treatment with hydroxyurea. If patients are regularly transfused, they will develop normally until the beginning of the second decade. At that time, they require chelation therapy (in addition to continued transfusions) to prevent complications of iron overload. Iron overload may manifest as growth delay or delay of sexual maturation. In adulthood, inadequate chelation therapy may lead to cardiomyopathy, cardiac arrhythmias, hepatic fibrosis and/or cirrhosis, diabetes, thyroid and parathyroid abnormalities, thrombosis, and osteoporosis. Frequent transfusions also put subjects at risk for infection with HIV, hepatitis B and hepatitis C.

[0015] β-Thal intermedia subjects generally present between the ages of 2-6 years. They do not generally require blood transfusions. However, bone abnormalities occur due to chronic hypertrophy of the erythroid lineage to compensate for chronic anemia. Subjects may have fractures of the long bones due to osteoporosis. Extramedullary erythropoiesis is common and leads to enlargement of the spleen, liver, and lymph nodes. It may also cause spinal cord compression and neurologic problems. Subjects also suffer from lower extremity ulcers and are at increased risk for thrombotic events, including stroke, pulmonary embolism, and deep vein thrombosis. Treatment of β-Thal intermedia includes splenectomy, folic acid supplementation, hydroxyurea therapy, and radiotherapy for extramedullary masses. Chelation therapy is used in subjects who develop iron overload.

[0016] Life expectancy is often diminished in β-Thal patients. Subjects with β-Thal major who do not receive transfusion therapy generally die in their second or third decade. Subjects with β-Thal major who receive regular transfusions and adequate chelation therapy can live into their fifth decade and beyond. Cardiac failure secondary to iron toxicity is the leading cause of death in β-Thal major subjects due to iron toxicity.

[0017] A variety of new treatments are currently in development for SCD and β-Thal. Delivery of an anti-sickling HBB gene via gene therapy is currently being investigated in clinical trials. However, the long-term efficacy and safety of this approach is unknown. Transplantation with hematopoietic stem cells (HSCs) from an HLA-matched allogeneic stem cell donor has been demonstrated to cure SCD and β-Thal, but this procedure involves risks including those associated with ablation therapy, which is required to prepare the subject for transplant, increases risk of life-threatening opportunistic infections, and risk of graft vs. host disease after transplantation. In addition, matched allogeneic donors often cannot be identified. Thus, there is a need for improved methods of managing these and other hemoglobinopathies.

### SUMMARY

[0018] Provided herein are genome editing systems, ribonucleoprotein (RNP) complexes, guide RNAs, Cpf1 proteins, including modified Cpf1 proteins (Cpf1 variants), and CRISPR-mediated methods for altering the promoter region of one or more γ-globin genes (e.g., HBG1, HBG2, or HBG1 and HBG2) and increasing expression of fetal hemoglobin (HbF). In certain embodiments, an RNP complex may include a guide RNA (gRNA) complexed to a wild-type Cpf1 or modified Cpf1 RNA-guided nuclease (modified Cpf1 protein). In certain embodiments, a gRNA may comprise a sequence set forth in Table 13, Table 18, or Table 19. In certain embodiments, a gRNA may comprise a gRNA targeting domain. In certain embodiments, a gRNA targeting domain may comprise a sequence selected from the group consisting of SEQ ID NOs: 1002, 1254, 1258, 1260, 1262, and 1264. In certain embodiments, a gRNA may comprise a gRNA sequence set forth in Table 19. In certain embodiments, a gRNA may comprise a sequence selected from the group consisting of SEQ ID NOs: 1022, 1023, 1041-1105. In certain embodiments, the RNP complex may comprise an RNP complex set forth in Table 21. For example, an RNP complex may include a gRNA comprising the sequence set forth in SEQ ID NO:1051 and a modified Cpf1 protein encoded by the sequence set forth in SEQ ID NO:1097 (RNP32, Table 21).

[0019] The inventors have discovered herein that delivery of an RNP complex including a gRNA complexed to a modified Cpf1 protein may result in increased editing of a target nucleic acid. In certain embodiments, the modified Cpf1 protein may contain one or more modifications. In certain embodiments, the one or more modifications may include, without limitation, one or more mutations in a wild-type Cpf1 amino acid sequence, one or more mutations in a wild-type Cpf1 nucleic acid sequence, one or more nuclear localization signals (NLS), one or more purification tags (e.g., His tag), or a combination thereof. In certain embodiments, a modified Cpf1 may be encoded by a sequence set forth in SEQ ID NOs: 1000, 1001, 1008-1018, 1032, 1035-39, 1094-1097, 1107-09 (Cpf1 polypeptide sequences) or SEQ ID NOs: 1019-1021, 1110-17 (Cpf1 polynucleotide sequences). In certain embodiments, the gRNA may be a modified or unmodified gRNA. In certain embodiments, the gRNA may comprise a sequence set forth in Table 13, Table 18, or Table 19. In certain embodiments, the RNP complex may comprise an RNP complex set forth in Table 21. For example, the RNP complex may include a gRNA comprising the sequence set forth in SEQ ID NO:1051 and a modified Cpf1 protein encoded by the sequence set forth in SEQ ID NO:1097 (RNP32, Table 21). In certain embodiments, an RNP complex comprising a modified Cpf1 protein may increase editing of a target nucleic acid. In certain embodiments, an RNP complex comprising a modified Cpf1 protein may increase editing resulting in an increase of productive indels. In various embodiments, an increase in editing of the target nucleic acid may be assessed by any means known to skilled artisans, such as, but not limited to, PCR amplification of the target nucleic acid and subsequent sequencing analysis (e.g., Sanger sequencing, next generation sequencing).

[0020] The inventors have also discovered herein that delivery of an RNP complex including a modified gRNA complexed to an unmodified or modified Cpf1 protein may result in increased editing of a target nucleic acid. In certain embodiments, the modified gRNA may comprise one or more modifications including a phosphorothioate linkage modification, a phosphorodithioate (PS2) linkage modification, a 2′-O-methyl modification, one or more or a stretch of deoxyribonucleic acid (DNA) bases (also referred to herein as a “DNA extension”), one or more or a stretch of ribonucleic acid (RNA) bases (also referred to herein as a “RNA extension”), or combinations thereof. In certain embodiments, the DNA extension may comprise a sequence set forth in Table 24. For example, in certain embodiments, the DNA extension may comprise a sequence set forth in SEQ ID NOs: 1235-1250. In certain embodiments, the RNA extension may comprise a sequence set forth in Table 24. For example, in certain embodiments, the RNA extension may comprise a sequence set forth in SEQ ID NOs: 1231-1234, 1251-1253. In certain embodiments, the gRNA may comprise a sequence set forth in Table 13, Table 18, or Table 19. In certain embodiments, the RNP complex may comprise an RNP complex set forth in Table 21. For example, the RNP complex may include a gRNA comprising the sequence set forth in SEQ ID NO:1051 and a modified Cpf1 protein encoded by the sequence set forth in SEQ ID NO: 1097 (RNP32, Table 21). In certain embodiments, an RNP complex comprising a modified gRNA may increase editing of a target nucleic acid. In certain embodiments, an RNP complex comprising a modified gRNA may increase editing resulting in an increase of productive indels.

[0021] In certain embodiments, an RNP complex comprising a modified gRNA and a modified Cpf1 protein may increase editing of a target nucleic acid. In certain embodiments, an RNP complex comprising a modified gRNA and a modified Cpf1 protein may increase editing resulting in an increase of productive indels.

[0022] The inventors have also discovered that codelivery of an RNP complex comprising a gRNA complexed to a Cpf1 molecule (e.g., “gRNA-Cpf1-RNP”) with a “booster element” may result in increased editing of a target nucleic acid. In certain embodiments, the RNP complex may comprise an RNP complex set forth in Table 21. For example, the RNP complex may include a gRNA comprising the sequence set forth in SEQ ID NO:1051 and a modified Cpf1 protein encoded by the sequence set forth in SEQ ID NO:1097 (RNP32, Table 21). As used herein, the term “booster element” refers to an element which, when co-delivered with a RNP complex comprising a gRNA complexed to an RNA-guided nuclease (“gRNA-nuclease-RNP”), increases editing of a target nucleic acid compared with editing of the target nucleic acid without the booster element. In certain embodiments, one or more booster elements may be codelivered with a gRNA-nuclease-RNP complex to increase editing of a target nucleic acid. In certain embodiments, codelivery of a booster element may increase editing resulting in an increase of productive indels. In various embodiments, an increase in editing of the target nucleic acid may be assessed by any means known to skilled artisans, such as, but not limited to, PCR amplification of the target nucleic acid and subsequent sequencing analysis (e.g., Sanger sequencing, next generation sequencing).

[0023] In certain embodiments, a gRNA-nuclease-RNP may comprise a gRNA-Cpf1-RNP. In certain embodiments, a Cpf1 molecule of the gRNA-Cpf1-RNP complex may be a wild-type Cpf1 or modified Cpf1. In certain embodiments, the Cpf1 molecule of the gRNA-Cpf1-RNP may be encoded by a sequence set forth in SEQ ID NOs: 1000, 1001, 1008-1018, 1032, 1035-39, 1094-1097, 1107-09 (Cpf1 polypeptide sequences) or SEQ ID NOs: 1019-1021, 1110-17 (Cpf1 polynucleotide sequences). In certain embodiments, the gRNA-Cpf1-RNP complex may comprise a gRNA comprising a targeting domain set forth in Table 13 or Table 18. In certain embodiments, the gRNA-Cpf1-RNP complex may comprise a gRNA comprising a sequence set forth in Table 19. In certain embodiments, the gRNA may be a modified or unmodified gRNA.

[0024] In certain embodiments, a booster element may comprise a dead RNP comprising a dead gRNA molecule complexed with an RNA-guided nuclease molecule (“dead gRNA-nuclease-RNP”). In certain embodiments, the dead gRNA-nuclease-RNP may comprise a dead gRNA complexed with a wild-type (WT) Cas9 molecule (“dead gRNA-Cas9-RNP”), a dead gRNA complexed with a Cas9 nickase molecule (“dead gRNA-nickase-RNP”) or a dead gRNA complexed with an enzymatically inactive (ei) Cas9 molecule (“dead gRNA-eiCas9-RNP”). In certain embodiments, the dead gRNA-nuclease-RNP complex may have decreased activity or lack nuclease activity. In certain embodiments, the dead gRNA of the dead gRNA-nuclease-RNP complex may comprise any of the dead gRNAs set forth herein. For example, the dead gRNA may comprise a targeting domain may be the same as or may differ by no more than 3 nucleotides from a dead gRNA targeting domain set forth in Table 10 or Table 15. In certain embodiments, the dead gRNA may include a targeting domain comprising a truncation of a gRNA targeting domain. In certain embodiments, the gRNA targeting domain to be truncated may be a gRNA targeting domain set forth in Table 2, Table 10, or Table 15. In certain embodiments, the dead gRNA may be a modified or unmodified dead gRNA. As shown herein, codelivery of a gRNA-Cpf1-RNP with a dead gRNA-Cas9-RNP (i.e., an RNP comprising a dead gRNA complexed to a WT Cas9) or codelivery of a gRNA-Cpf1-RNP with a dead gRNA-nickase-RNP (i.e., an RNP comprising a dead gRNA complexed to a Cas9 nickase (i.e., the Cas9 D10A nickase)) resulted in an increase in total editing above levels observed following delivery of gRNA-Cpf1-RNP alone (see, e.g., Examples, 15, 17, 18). Dead gRNA molecules may comprise targeting domains complementary to regions proximal to or within a target region (e.g., the CCAAT box target region, 13 nt target region, proximal HBG1/2 promoter target sequence, and/or the GATA1 binding motif in BCL11Ae) in a target nucleic acid. In certain embodiments, “proximal to” may denote the region within 10, 25, 50, 100, or 200 nucleotides of a target region (e.g., the CCAAT box target region, 13 nt target region, proximal HBG1/2 promoter target sequence, and/or the GATA1 binding motif in BCL11Ae). In certain embodiments, one or more booster elements may be comprised of one or more dead gRNA-nuclease-RNPs, e.g., dead gRNA-Cas9-RNP, dead gRNA-nickase-RNP, dead gRNA-eiCas9-RNP, to be codelivered with a gRNA-Cpf1-RNP. In certain embodiments, codelivery of a dead gRNA-nuclease-RNP does not alter the indel profile of a gRNA-Cpf1-RNP.

[0025] In certain embodiments, a booster element may comprise an RNP complex comprising a gRNA molecule complexed with an RNA-guided nuclease nickase molecule (“gRNA-nickase-RNP”). In certain embodiments, the RNA-guided nuclease nickase molecule may be a Cas9 nickase molecule, e.g., Cas9 D10A nickase. In certain embodiments, the gRNA of the gRNA-nickase-RNP may comprise any of the gRNAs set forth herein. For example, the gRNA may comprise a gRNA targeting domain set forth in Table 2, Table 10, or Table 15. In certain embodiments, the gRNA may be a modified or unmodified gRNA. As shown herein, codelivery of gRNA-Cpf1-RNP with a gRNA-nickase-RNP complex (RNP comprising a guide RNA complexed to a Cas9D10A nickase molecule) resulted in an increase in total editing above levels observed following delivery of gRNA-Cpf1-RNP alone (see, e.g., Examples 15, 16). Additionally, codelivery of a gRNA-nickase-RNP complex with a gRNA-Cpf1-RNP complex altered the directionality, length, and/or position of the indel profile of gRNA-Cpf1-RNP. In certain embodiments, a booster enhancer may be used to provide a desired editing outcome, for example, to increase the rate of productive indels. In certain embodiments, codelivery of a gRNA-nickase-RNP complex with a gRNA-Cpf1-RNP complex may alter the indel profile of the gRNA-Cpf1-RNP.

[0026] In certain embodiments, a booster element may comprise a single stranded oligodeoxynucleotide (ssODN) or a double stranded oligodeoxynucleotide (dsODN). In certain embodiments, the ssODN may be any ssODN disclosed herein. In certain embodiments, an ssODN may comprise a sequence set forth in Table 11. For example, in certain embodiments, an ssODN may comprise the sequence set forth in SEQ ID NO: 1040.

[0027] In one aspect, the disclosure relates to an RNP complex comprising a CRISPR from Prevotella and Franciscella 1 (Cpf1) RNA-guided nuclease or a variant thereof and a gRNA, wherein the gRNA is capable of binding to a target site in a promoter of an HBG gene in a cell. In certain embodiments, the gRNA may be modified or unmodified. In certain embodiments, the gRNA may comprise one or more modifications including a phosphorothioate linkage modification, a phosphorodithioate (PS2) linkage modification, a 2′-O-methyl modification, a DNA extension, an RNA extension, or combinations thereof. In certain embodiments, the DNA extension may comprise a sequence set forth in Table 24. In certain embodiments, the RNA extension may comprise a sequence set forth in Table 24. In certain embodiments, the gRNA may comprise a sequence set forth in Table 13, Table 18, or Table 19. In certain embodiments, the RNP complex may comprise an RNP complex set forth in Table 21. For example, the RNP complex may include a gRNA comprising the sequence set forth in SEQ ID NO:1051 and a Cpf1 variant protein encoded by the sequence set forth in SEQ ID NO:1097 (RNP32, Table 21). In certain embodiments, the Cpf1 variant protein may contain one or more modifications. In certain embodiments, the one or more modifications may include, without limitation, one or more mutations in a wild-type Cpf1 amino acid sequence, one or more mutations in a wild-type Cpf1 nucleic acid sequence, one or more nuclear localization signals (NLS), one or more purification tags (e.g., His tag), or a combination thereof. In certain embodiments, a Cpf1 variant protein may be encoded by a sequence set forth in SEQ ID NOs: 1000, 1001, 1008-1018, 1032, 1035-39, 1094-1097, 1107-09 (Cpf1 polypeptide sequences) or SEQ ID NOs: 1019-1021, 1110-17 (Cpf1 polynucleotide sequences).

[0028] In one aspect, the disclosure relates to a method of altering a promoter of an HBG gene in a cell comprising contacting the cell with an RNP complex disclosed herein. In certain embodiments, the alteration may comprise an indel within one or more regions set forth in Table 17. In certain embodiments, the alteration may comprise an indel within a CCAAT box target region of the promoter of an HBG gene. For example, in certain embodiments, the alteration may comprise an indel within Chr 11 (NC_000011.10): 5,249,955-5,249,987 (Table 17, Region 6), Chr 11 (NC_000011.10): 5,254,879-5,254,909 (Table 17, Region 16), or a combination thereof. In certain embodiments, the RNP complex may comprise a gRNA and a Cpf1 protein. In certain embodiments, the gRNA may comprise an RNA targeting domain set forth in Table 19. In certain embodiments, the gRNA targeting domain may comprise a sequence selected from the group consisting of SEQ ID NOs: 1002, 1254, 1258, 1260, 1262, and 1264. In certain embodiments, the gRNA may comprise a gRNA sequence set forth in Table 19. In certain embodiments, the gRNA may comprise a sequence selected from the group consisting of SEQ ID NOs: 1022, 1023, 1041-1105. In certain embodiments, a gRNA may be configured to provide an editing event at Chr11: 5249973, Chr11: 5249977 (HBG1); Chr11: 5250042, Chr11: 5250046 (HBG1); Chr11: 5250055, Chr11: 5250059 (HBG1); Chr11: 5250179, Chr11: 5250183 (HBG1); Chr11: 5254897, Chr11: 5254901 (HBG2); Chr11: 5254897, Chr11: 5254901 (HBG2); Chr11: 5254966, 5254970 (HBG2); Chr11: 5254979, 5254983 (HBG2) (Table 22, Table 23). In certain embodiments, the cell may be further contacted with a booster element. In certain embodiment, a booster element may comprise a single stranded oligodeoxynucleotide (ssODN) or a double stranded oligodeoxynucleotide (dsODN). In certain embodiments, the ssODN may be any ssODN disclosed herein. In certain embodiments, an ssODN may comprise a sequence set forth in Table 11. For example, in certain embodiments, an ssODN may comprise the sequence set forth in SEQ ID NO:1040.

[0029] In one aspect, the disclosure relates to an isolated cell comprising an alteration in a promoter of HBG gene generated by the delivery of an RNP complex to the cell. In certain embodiments, the RNP complex may comprise a gRNA and a Cpf1 protein. In certain embodiments, the gRNA may be modified or unmodified. In certain embodiments, the gRNA may comprise one or more modifications including a phosphorothioate linkage modification, a phosphorodithioate (PS2) linkage modification, a 2′-O-methyl modification, a DNA extension, an RNA extension, or combinations thereof. In certain embodiments, the DNA extension may comprise a sequence set forth in Table 24. In certain embodiments, the RNA extension may comprise a sequence set forth in Table 24. In certain embodiments, the gRNA may comprise a sequence set forth in Table 13, Table 18, or Table 19. In certain embodiments, the RNP complex may comprise an RNP complex set forth in Table 21. For example, the RNP complex may include a gRNA comprising the sequence set forth in SEQ ID NO:1051 and a Cpf1 variant protein encoded by the sequence set forth in SEQ ID NO:1097 (RNP32, Table 21). In certain embodiments, the Cpf1 variant protein may contain one or more modifications. In certain embodiments, the one or more modifications may include, without limitation, one or more mutations in a wild-type Cpf1 amino acid sequence, one or more mutations in a wild-type Cpf1 nucleic acid sequence, one or more nuclear localization signals (NLS), one or more purification tags (e.g., His tag), or a combination thereof. In certain embodiments, a Cpf1 variant protein may be encoded by a sequence set forth in SEQ ID NOs: 1000, 1001, 1008-1018, 1032, 1035-39, 1094-1097, 1107-09 (Cpf1 polypeptide sequences) or SEQ ID NOs: 1019-1021, 1110-17 (Cpf1 polynucleotide sequences). In certain embodiments, a booster element may be co-delivered with the RNP complex. In certain embodiment, a booster element may comprise a single stranded oligodeoxynucleotide (ssODN) or a double stranded oligodeoxynucleotide (dsODN). In certain embodiments, the ssODN may be any ssODN disclosed herein. In certain embodiments, an ssODN may comprise a sequence set forth in Table 11. For example, in certain embodiments, an ssODN may comprise the sequence set forth in SEQ ID NO:1040.

[0030] In one aspect, the disclosure relates to an ex vivo method of increasing the level of fetal hemoglobin (HbF) in a human cell by genome editing using an RNP complex comprising a gRNA and a Cpf1 RNA-guided nuclease or a variant thereof to affect an alteration in a promoter of an HBG gene, thereby to increase expression of HbF. In certain embodiments, the gRNA may be modified or unmodified. In certain embodiments, the gRNA may comprise one or more modifications including a phosphorothioate linkage modification, a phosphorodithioate (PS2) linkage modification, a 2′-O-methyl modification, a DNA extension, an RNA extension, or combinations thereof. In certain embodiments, the DNA extension may comprise a sequence set forth in Table 24. In certain embodiments, the RNA extension may comprise a sequence set forth in Table 24. In certain embodiments, the gRNA may comprise a sequence set forth in Table 13, Table 18, or Table 19. In certain embodiments, the RNP complex may comprise an RNP complex set forth in Table 21. For example, the RNP complex may include a gRNA comprising the sequence set forth in SEQ ID NO:1051 and a Cpf1 variant protein encoded by the sequence set forth in SEQ ID NO:1097 (RNP32, Table 21). In certain embodiments, the Cpf1 variant protein may contain one or more modifications. In certain embodiments, the one or more modifications may include, without limitation, one or more mutations in a wild-type Cpf1 amino acid sequence, one or more mutations in a wild-type Cpf1 nucleic acid sequence, one or more nuclear localization signals (NLS), one or more purification tags (e.g., His tag), or a combination thereof. In certain embodiments, a Cpf1 variant protein may be encoded by a sequence set forth in SEQ ID NOs: 1000, 1001, 1008-1018, 1032, 1035-39, 1094-1097, 1107-09 (Cpf1 polypeptide sequences) or SEQ ID NOs: 1019-1021, 1110-17 (Cpf1 polynucleotide sequences). In certain embodiments, a booster element may be co-delivered with the RNP complex. In certain embodiment, a booster element may comprise a single stranded oligodeoxynucleotide (ssODN) or a double stranded oligodeoxynucleotide (dsODN). In certain embodiments, the ssODN may be any ssODN disclosed herein. In certain embodiments, an ssODN may comprise a sequence set forth in Table 11. For example, in certain embodiments, an ssODN may comprise the sequence set forth in SEQ ID NO:1040.

[0031] In one aspect, the disclosure relates to a population of CD34+ or hematopoietic stem cells, wherein one or more cells in the population comprises an alteration in a promoter of an HBG gene, which alteration is generated by delivering an RNP complex comprising a gRNA and a Cpf1 RNA-guided nuclease or a variant thereof to the population of CD34+ or hematopoietic stem cells. In certain embodiments, the gRNA may be modified or unmodified. In certain embodiments, the gRNA may comprise one or more modifications including a phosphorothioate linkage modification, a phosphorodithioate (PS2) linkage modification, a 2′-O-methyl modification, a DNA extension, an RNA extension, or combinations thereof. In certain embodiments, the DNA extension may comprise a sequence set forth in Table 24. In certain embodiments, the RNA extension may comprise a sequence set forth in Table 24. In certain embodiments, the gRNA may comprise a sequence set forth in Table 13, Table 18, or Table 19. In certain embodiments, the RNP complex may comprise an RNP complex set forth in Table 21. For example, the RNP complex may include a gRNA comprising the sequence set forth in SEQ ID NO:1051 and a Cpf1 variant protein encoded by the sequence set forth in SEQ ID NO: 1097 (RNP32, Table 21). In certain embodiments, the Cpf1 variant protein may contain one or more modifications. In certain embodiments, the one or more modifications may include, without limitation, one or more mutations in a wild-type Cpf1 amino acid sequence, one or more mutations in a wild-type Cpf1 nucleic acid sequence, one or more nuclear localization signals (NLS), one or more purification tags (e.g., His tag), or a combination thereof. In certain embodiments, a Cpf1 variant protein may be encoded by a sequence set forth in SEQ ID NOs: 1000, 1001, 1008-1018, 1032, 1035-39, 1094-1097, 1107-09 (Cpf1 polypeptide sequences) or SEQ ID NOs: 1019-1021, 1110-17 (Cpf1 polynucleotide sequences). In certain embodiments, a booster element may be co-delivered with the RNP complex. In certain embodiment, a booster element may comprise a single stranded oligodeoxynucleotide (ssODN) or a double stranded oligodeoxynucleotide (dsODN). In certain embodiments, the ssODN may be any ssODN disclosed herein. In certain embodiments, an ssODN may comprise a sequence set forth in Table 11. For example, in certain embodiments, an ssODN may comprise the sequence set forth in SEQ ID NO:1040.

[0032] In one aspect, the disclosure relates to a method of alleviating one or more symptoms of sickle cell disease in a subject in need thereof, the method comprising: a) isolating a population of CD34+ or hematopoietic stem cells from the subject; b) modifying the population of isolated cells ex vivo by delivering an RNP complex comprising a gRNA and a Cpf1 RNA-guided nuclease or a variant thereof to the population of isolated cells, thereby to affect an alteration in a promoter of an HBG gene in one or more cells in the population; and c) administering the modified population of cells to the subject, thereby to alleviate one or more symptoms of sickle cell disease in the subject. In certain embodiments, the alteration may comprise an indel within a CCAAT box target region of the promoter of the HBG gene. In certain embodiments, the RNP complex may be delivered using electroporation. In certain embodiments, at least about 5%, at least about 10%, at least about 20%, at least about 30%, at least about 40%, at least about 50%, at least about 60%, at least about 70%, at least about 80% or at least about 90% of the cells in the population of cells comprise a productive indel.

[0033] In one aspect, the disclosure relates to a gRNA comprising a 5′ end and a 3′ end, and comprising a DNA extension at the 5′ end and a 2′-O-methyl-3′-phosphorothioate modification at the 3′ end, wherein the gRNA includes an RNA segment capable of hybridizing to a target site and an RNA segment capable of associating with a Cpf1 RNA-guided nuclease. In certain embodiments, the DNA extension may comprise a sequence set forth in SEQ ID NOs: 1235-1250. In certain embodiments, the gRNA may be modified or unmodified. In certain embodiments, the gRNA may comprise one or more modifications including a phosphorothioate linkage modification, a phosphorodithioate (PS2) linkage modification, a 2′-O-methyl modification, a DNA extension, an RNA extension, or combinations thereof. In certain embodiments, the DNA extension may comprise a sequence set forth in Table 24. In certain embodiments, the RNA extension may comprise a sequence set forth in Table 24. In certain embodiments, the gRNA may comprise a sequence set forth in Table 13, Table 18, or Table 19.

[0034] In one aspect, the disclosure relates to an RNP complex comprising a Cpf1 RNA-guided nuclease as disclosed herein and a gRNA as disclosed herein.

[0035] Also provided herein are genome editing systems, guide RNAs, and CRISPR-mediated methods for altering one or more γ-globin genes (e.g., HBG1, HBG2, or HBG1 and HBG2), the erythroid specific enhancer of the BCL11A gene (BCL11Ae), or a combination thereof, and increasing expression of fetal hemoglobin (HbF). In certain embodiments, one or more gRNAs comprising a sequence set forth in Table 18 or Table 19 may be used to introduce alterations in the promoter region of the HBG gene. In certain embodiments, genome editing systems, guide RNAs, and CRISPR-mediated methods may alter a 13 nucleotide (nt) target region that is 5′ of the transcription site of the HBG1, HBG2, or HBG1 and HBG2 gene (“13 nt target region”). In certain embodiments, genome editing systems, guide RNAs, and CRISPR-mediated methods may alter a CCAAT box target region that is 5′ of the transcription site of the HBG1, HBG2, or HBG1 and HBG2 gene (“CCAAT box target region”). In certain embodiments, the CCAAT box target region may be the region that is at or near the distal CCAAT box and includes the nucleotides of the distal CCAAT box and 25 nucleotides upstream (5′) and 25 nucleotides downstream (3′) of the distal CCAAT box (i.e., HBG1/2 c.-86 to -140). In certain embodiments, the CCAAT box target region may be the region that is at or near the distal CCAAT box and includes the nucleotides of the distal CCAAT box and 5 nucleotides upstream (5′) and 5 nucleotides downstream (3′) of the distal CCAAT box (i.e., HBG1/2 c.-106 to -120). In certain embodiments, the CCAAT box target region may comprise a 18 nt target region, a 13 nt target region, a 11 nt target region, a 4 nt target region, a 1 nt target region, a -117G>A target region, or a combination thereof as disclosed herein. In certain embodiments, the alteration may be a 18 nt deletion, 13 nt deletion, 11 nt deletion, 4 nt deletion, 1 nt deletion, a substitution from G to A at c.-117 of the HBG1, HBG2, or HBG1 and HBG2 gene, or a combination thereof. In certain embodiments, the alteration may be a non-naturally occurring alteration or a naturally occurring alteration. In certain embodiments, one or more gRNAs comprising a targeting domain set forth in SEQ ID NOs: 251-901 or 940-942 may be used to introduce alterations in the 13 nt target region. In certain embodiments, one or more gRNAs comprising a sequence set forth in SEQ ID NOs: 251-901, 940-942, 996, 997, 970, 971, 1002, or 1003 may be used to introduce alterations in the CCAAT box target region. In certain embodiments, genome editing systems, guide RNAs, and CRISPR-mediated methods may alter a GATA1 binding motif in BCL11Ae that is in the +58 DNase I hypersensitive site (DHS) region of intron 2 of the BCL11A gene (“GATA1 binding motif in BCL11Ae”). In certain embodiments, one or more gRNAs comprising a targeting domain set forth in SEQ ID NOs: 952-955 may be used to introduce alterations in the GATA1 binding motif in BCL11Ae. In certain embodiments, one or more gRNAs may be used to introduce alterations in the GATA1 binding motif in BCL11Ae and one or more gRNAs may be used to introduce alterations in the 13 nt target region of HBG1 and/or HBG2.

[0036] Also provided herein in certain embodiments are the use of optional genome editing system components such as template nucleic acids (oligonucleotide donor templates). In certain embodiments, template nucleic acids for use in targeting the CCAAT target region may include, without limitation, template nucleic acids encoding alterations of the CCAAT box target region. In certain embodiments, the CCAAT box target region may comprise a 18 nt target region, a 11 nt target region, a 4 nt target region, a 1 nt target region, or a combination thereof. In certain embodiments, the template nucleic acid may be a single stranded oligodeoxynucleotide (ssODN) or a double stranded oligodeoxynucleotide (dsODN). In certain embodiments, 5′ and 3′ homology arms, and exemplary full-length donor templates encoding alterations at the CCAAT box target region are also presented below (e.g., SEQ ID NOS: 904-909, 974-995). In certain embodiments, the template nucleic acid may be a positive strand or a negative strand. In certain embodiments, the ssODN may comprise a 5′ homology arm, a replacement sequence, and a 3′ homology arm. In certain embodiments, the 5′ homology arm may be about 25 to about 200 nucleotides or more in length, e.g., at least about 25, 50, 75, 100, 125, 150, 175, or 200 nucleotides in length; the replacement sequence may comprise 0 nucleotides in length; and the 3′ homology arm may be about 25 to about 200 nucleotides or more in length, e.g., at least about 25, 50, 75, 100, 125, 150, 175, or 200 nucleotides in length. In certain embodiments, the ssODN may comprise one or more phosphorothioates.

[0037] In certain embodiments, the genome editing systems, guide RNAs, and CRISPR-mediated methods for altering one or more γ-globin genes (e.g., HBG1, HBG2, or HBG1 and HBG2), may include an RNA-guided nuclease. In certain embodiments, the RNA-guided nuclease may a Cas9 or modified Cas 9. In certain embodiments, the RNA-guided nuclease may a Cpf1 or modified Cpf1 as disclosed herein.

[0038] In one aspect, the disclosure relates to compositions including a plurality of cells generated by the methods disclosed above, in which at least 20%, 30%, 40%, 50%, 60%, 70%, 80% or 90% of the cells include an alteration of a sequence of a 13 nt target region of the human HBG1 or HBG2 gene or a plurality of cells generated by the methods disclosed above, wherein at least 20%, 30%, 40%, 50%, 60%, 70%, 80% or 90% of the cells include an alteration of a sequence of a 13 nt target region of the human HBG1 or HBG2 gene and at least 20%, 30%, 40%, 50%, 60%, 70%, 80% or 90% of the cells include an alteration of a sequence of the GATA1 binding motif in BCL11Ae. In certain embodiments, at least a portion of the plurality of cells may be within an erythroid lineage. In certain embodiments, the plurality of cells may be characterized by an increased level of fetal hemoglobin expression relative to an unmodified plurality of cells. In certain embodiments, the level of fetal hemoglobin may be increased by at least 20%, 30%, 40%, 50%, 60%, 70%, 80% or 90%. In certain embodiments, the compositions may further include a pharmaceutically acceptable carrier.

[0039] In one aspect, the disclosure relates to a method of altering a cell, that includes unwinding a chromatin segment within or proximal to a target region of a nucleic acid in a cell and generating a double stranded break (DSB) within the target region of the nucleic acid whereby to alter the target region. In certain embodiments, the step of unwinding the chromatin segment may include contacting the chromatin segment with an RNA-guided helicase. In certain embodiments, the step of unwinding the chromatin does not include recruiting an exogenous trans-acting factor to the chromatin segment. The RNA-guided helicase may be an RNA-guided nuclease, and the RNA-guided nuclease may be complexed to a dead guide RNA (dgRNA) including a first targeting domain sequence of 15 or fewer nucleotides in length. In certain embodiments, the dgRNA may include modifications at the 5′ or 3′ end, including, but not limited to, an anti-reverse cap analog (ARCA) at the 5′ end of the RNA, a polyA tail at the 3′ end of the RNA, or both. In certain embodiments, the RNA-guided helicase may be an enzymatically active RNA-guided nuclease or may be configured to lack nuclease activity. In certain embodiments, the targeting domain sequence of the dgRNA may be complementary to a sequence proximal to the target region. “Proximal to,” in some embodiments herein, may mean within 10, 25, 50, 100, or 200 nucleotides of the target region. In certain embodiments, the step of unwinding the chromatin segment may not include forming a single or double-stranded break in the nucleic acid within the chromatin segment. In certain embodiments, the step of generating the DSB within the target region may include contacting the chromatin segment with an RNA-guided nuclease having nuclease activity. In certain embodiments, the RNA-guided nuclease having nuclease activity may be complexed to a gRNA including a targeting domain configured to overlap the target region. In certain embodiments, the RNA-guided nuclease having nuclease activity may be a Cpf1 molecule.

[0040] Another aspect of the disclosure includes a method of inducing accessibility to a target region of a nucleic acid for editing in a cell including contacting the cell with an RNA-guided helicase and a dgRNA and unwinding DNA within or proximal to the target region with the RNA-guided helicase thereby inducing accessibility to the target region for editing. In various cases, the RNA-guided helicase and the dgRNA may be configured to associate within or proximal to the target region. In certain embodiments, the dgRNA may be configured such that it does not provide an RNA-guided nuclease cleavage event. In certain embodiments, the RNA-guided helicase and dgRNA may complex to form a dead ribonucleoprotein (RNP) that lacks cleavage activity. In certain embodiments, the dgRNA may include a targeting domain sequence of 15 or fewer nucleotides in length. In certain embodiments, the RNA-guided helicase may be an RNA-guided nuclease. In certain embodiments, the RNA-guided nuclease and dgRNA are not configured to recruit an exogenous trans-acting factor to the target region. In certain embodiments, the RNA-guided nuclease may be a Cas9 or a Cas9-fusion protein. In certain embodiments, the Cas9 may be an enzymatically active Cas9 or an enzymatically dead Cas9. In certain embodiments, the Cas9 may be a nickase, e.g., Cas9 D10A. In certain embodiments, the step of unwinding the DNA does not comprise forming a single or double-stranded break in the DNA. In certain embodiments, the RNA-guided nuclease having nuclease activity may be complexed to a gRNA including a targeting domain configured to overlap the target region. In certain embodiments, the RNA-guided nuclease having nuclease activity may be a Cpf1 molecule.

[0041] In another aspect, the disclosure relates to a method of increasing a rate of indel formation in a nucleic acid that includes unwinding double stranded DNA within or proximal to a target region of the nucleic acid using an RNA-guided helicase configured to associate within or proximal to the target region and generating a DSB within the target region. In certain embodiments, generating a DSB within the target region results in forming an indel at the target region. In certain embodiments, the DSB may be repaired in a manner forming an indel at the target region. In certain embodiments, the rate of indel formation in the gene achieved using the RNA-guided helicase is increased compared to a rate of indel formation in the gene achieved without using the RNA-guided helicase. In certain embodiments, the RNA-guided helicase may form an RNP complex with a dgRNA configured to associate within or proximal to the target region. In certain embodiments, the dgRNA may include a targeting domain sequence of 15 nucleotides or less in length. In certain embodiments, the RNA-guided helicase may be an RNA-guided nuclease. In certain embodiments, the RNA-guided nuclease may be a Cas9 or a Cas9-fusion protein. In certain embodiments, the Cas9 may be an enzymatically active Cas9 or an enzymatically dead Cas9. In certain embodiments, the Cas9 may be a nickase, e.g., Cas9 D10A. In certain embodiments, the RNA-guided nuclease and the dgRNA are not configured to recruit an exogenous trans-acting factor to the target region. In certain embodiments, the step of unwinding the double stranded DNA does not include forming a single or double-stranded break in the DNA.

[0042] In yet another aspect, this disclosure relates to a method of deleting a segment of a target nucleic acid in a cell that includes contacting the cell with an RNA-guided helicase and generating a DSB within the target region, whereby a segment of the target nucleic acid is deleted. In certain embodiments, the DSB may be repaired in a manner that deletes a segment of the target nucleic acid. In certain embodiments, the RNA-guided helicase may be configured to associate within or proximal to a target region of the target nucleic acid and unwind double stranded DNA (dsDNA) within or proximal to the target region. In certain embodiments, the RNA-guided helicase may form an ribonucleoprotein complex with a dgRNA configured to associate within or proximal to the target region. In certain embodiments, the dgRNA may include a targeting domain sequence of 15 nucleotides or less in length. In certain embodiments, the RNA-guided helicase may be an RNA-guided nuclease. In certain embodiments, the RNA-guided nuclease may be a Cas9 or a Cas9-fusion protein. In certain embodiments, the Cas9 may be an enzymatically active Cas9 or an enzymatically dead Cas9. In certain embodiments, the RNA-guided nuclease and the dgRNA are not configured to recruit an exogenous trans-acting factor to the target region. In certain embodiments, the target nucleic acid may be a promoter region of a gene, a coding region of a gene, a non-coding region of a gene, an intron of a gene, or an exon of a gene. In certain embodiments, the segment of the target nucleic acid may be at least about 15, 20, 25, 30, 35, 40, 45, 50, 55, 60, 65, 70, 75, or 100 base pairs in length.

[0043] The disclosure also relates to a dead gRNA (dgRNA) molecule including a targeting domain comprising a truncation of a gRNA targeting domain. In certain embodiments, the gRNA targeting domain to be truncated may be a gRNA targeting domain set forth in Table 2, Table 10, or Table 15. In certain embodiments, the gRNA targeting domain may be truncated from a 5′ end of the gRNA targeting domain. In certain embodiments, the dgRNA may include a targeting domain sequence of 15 nucleotides or less in length. In certain embodiments, the first targeting domain may be the same as or may differ by no more than 3 nucleotides from a dgRNA targeting domain set forth in Table 10 or Table 15.

[0044] Another aspect of the disclosure relates to compositions including at least one polynucleotide encoding a plurality of gRNAs and an RNA-guided helicase, in which at least one gRNA may be a dgRNA configured such that it does not provide an RNA-guided nuclease cleavage event. In certain embodiments, the dgRNA may include a targeting domain sequence of 15 nucleotides or less in length. In certain embodiments, the RNA-guided helicase may be an RNA-guided nuclease. In certain embodiments, the RNA-guided nuclease may be a Cas9 or a Cas9-fusion protein. In certain embodiments, the Cas9 may be an enzymatically active Cas9 or an enzymatically dead Cas9. In certain embodiments, the Cas9 may be a nickase, e.g., Cas9 D10A. In certain embodiments, the RNA-guided nuclease and the dgRNA are not configured to recruit an exogenous trans-acting factor to the target region. In certain embodiments, the compositions further include a second RNA-guided nuclease configured to provide a cleavage event. In certain embodiments, the compositions further include a second gRNA configured to provide a cleavage event.

[0045] In another aspect, the disclosure relates to genome editing systems that include an RNA-guided nuclease and an RNA-guided helicase configured to associate with a target nucleic acid proximal to a target region of the target nucleic acid and induce a conformational change in the target region thereby promoting accessibility to the target region for the RNA-guided nuclease to form a break in the target region. The disclosure also relates to genome editing systems that include a dgRNA including a targeting domain sequence of 15 nucleotides or less in length, a first RNA-guided nuclease, and an RNA-guided helicase. In certain embodiments, the genome editing system further includes a gRNA. In certain embodiments, the gRNA and the first RNA-guided nuclease may associate with a target region in a target nucleic acid. In certain embodiments, the first RNA-guided nuclease may be a Cpf1 molecule. In certain embodiments, the gRNA and the first RNA-guided nuclease may associate with a first PAM sequence in a target nucleic acid, wherein the first PAM sequence is facing outward. In certain embodiments, the RNA-guided helicase may be a second RNA-guided nuclease. In certain embodiments, the second RNA-guided nuclease and the dgRNA are not configured to recruit an exogenous trans-acting factor to the target region. In certain embodiments, the dgRNA and the second RNA-guided nuclease associate within or proximal to a target region in the target nucleic acid. In certain embodiments, the first RNA-guided nuclease and second RNA-guided nuclease may be complexed with the gRNA and dgRNAs, respectively, forming first and second ribonucleoprotein complexes.

[0046] In another aspect, the disclosure relates to a genome editing system that includes a dgRNA comprising a targeting domain sequence of 15 nucleotides or less in length, a first RNA-guided nuclease, and an RNA-guided helicase. In certain embodiments, the gRNA and the first RNA-guided nuclease may associate with a target region in a target nucleic acid. In certain embodiments, the first RNA-guided nuclease may be a Cpf1 molecule. In certain embodiments, the gRNA and the first RNA-guided nuclease may associate with a first protospacer adjacent motif (PAM) sequence in a target nucleic acid. In certain embodiments, the first PAM sequence may be facing outward. In certain embodiments, the RNA-guided helicase may be a second RNA-guided nuclease. In certain embodiments, the second RNA-guided nuclease and the dgRNA are not configured to recruit an exogenous trans-acting factor to the target region. In certain embodiments, the dgRNA and the second RNA-guided nuclease may associate within or proximal to a target region in the target nucleic acid. In certain embodiments, the first RNA-guided nuclease and second RNA-guided nuclease may be complexed with the gRNA and dgRNAs, respectively, forming first and second ribonucleoprotein complexes. In certain embodiments, the dgRNA and the second RNA-guided nuclease may associate with a second PAM sequence in a target nucleic acid, wherein the second PAM sequence may be facing outward.

[0047] In another aspect, the disclosure relates to a genome editing system that includes a dgRNA, a first gRNA comprising a second targeting domain sequence greater than 17 nucleotides in length, a first RNA-guided nuclease, and a second RNA-guided nuclease. In certain embodiments, the first RNA-guided nuclease and the dgRNA may be configured to associate within a first target region in a target nucleic acid. In certain embodiments, the second RNA-guided nuclease and the first gRNA may be configured to associate within a second target region and generate a double stranded break (DSB) in the target nucleic acid whereby to create an indel between the first target region and the second target region. In certain embodiments, the second RNA-guided nuclease may be a Cpf1 molecule. In certain embodiments, the dgRNA may comprise a first targeting domain sequence of 15 nucleotides or less in length. In certain embodiments, the dgRNA has reduced or no RNA-guided nuclease cleavage activity. In certain embodiments, the dgRNA may be configured such that it does not provide an RNA-guided nuclease cleavage event. In certain embodiments, the dgRNA and the first RNA-guided nuclease may associate with a first protospacer adjacent motif (PAM) sequence in the target nucleic acid. In certain embodiments, the first PAM sequence may be facing outward. In certain embodiments, the first gRNA and the second RNA-guided nuclease may associate with a second PAM sequence in the target nucleic acid. In certain embodiments, the second PAM sequence may be facing outward.

[0048] In another aspect, the disclosure relates to a method of altering a cell, including contacting the cell with a dgRNA, a first gRNA comprising a second targeting domain sequence greater than 17 nucleotides in length, a first RNA-guided nuclease, and a second RNA-guided nuclease. In certain embodiments, the first RNA-guided nuclease and the dgRNA may be configured to associate within a first target region in a target nucleic acid. In certain embodiments, the second RNA-guided nuclease and the first gRNA may associate within a second target region and generate a double stranded break (DSB) in the target nucleic acid whereby to create an indel between the first target region and the second target region. In certain embodiments, the second RNA-guided nuclease may be a Cpf1 molecule. In certain embodiments, the dgRNA may comprise a first targeting domain sequence of 15 nucleotides or less in length. In certain embodiments, the dgRNA has reduced or no RNA-guided nuclease cleavage activity. In certain embodiments, the dgRNA may be configured such that it does not provide an RNA-guided nuclease cleavage event. In certain embodiments, the dgRNA and the first RNA-guided nuclease may associate with a first protospacer adjacent motif (PAM) sequence in the target nucleic acid. In certain embodiments, the first PAM sequence may be facing outward. In certain embodiments, the first gRNA and the second RNA-guided nuclease may associate with a second PAM sequence in the target nucleic acid. In certain embodiments, the second PAM sequence may be facing outward.

[0049] The disclosure herein also relates to methods of altering a cells, including contacting a cell with any of the genome editing systems disclosed herein. In certain embodiments, the step of contacting the cell may comprise contacting the cell with a solution comprising first and second ribonucleoprotein complexes. In certain embodiments, the step of contacting the cell with the solution further comprises electroporating the cells, thereby introducing the first and second ribonucleoprotein complexes into the cell.

[0050] In another aspect, the disclosure relates to cells that are altered using the methods disclosed herein. Cells that include a productive indel which results in HbF expression are also disclosed herein. In certain embodiments the indel may be produced by contacting the cell with a dgRNA, a first gRNA including a second targeting domain sequence greater than 17 nucleotides in length, a first RNA-guided nuclease, and a second RNA-guided nuclease. In certain embodiments, the first RNA-guided nuclease and the dgRNA may be configured to associate within a first target region in a target nucleic acid. In certain embodiments, the second RNA-guided nuclease and the first gRNA may associate with a second target region and generate a double stranded break (DSB) in the target nucleic acid whereby to create an indel between the first target region and the second target region. In certain embodiments, the cells disclosed herein, may be capable of differentiating into an erythroblast, erythrocyte, or a precursor of an erythrocyte or erythroblast. In certain embodiments, the cell may be a CD34+ cell.

[0051] A genome editing system or method including any of all of the features described above may include a target nucleic acid comprising a human HBG1, HBG2 gene, or a combination thereof. In certain embodiments, the target region may be a CCAAT box target region of the human HBG1, HBG2 gene, or a combination thereof. In certain embodiments, the first targeting domain sequence may be complementary to a first sequence on a side of a CCAAT box target region of the human HBG1, HBG2 gene, or a combination thereof, in which the first sequence optionally overlaps the CCAAT box target region of the human HBG1, HBG2 gene, or a combination thereof. In certain embodiments, the second targeting domain sequence may be complementary to a second sequence on a side of a CCAAT box target region of the human HBG1, HBG2 gene, or a combination thereof, in which the second sequence optionally overlaps the CCAAT box target region of the human HBG1, HBG2 gene, or a combination thereof. In certain embodiments, the first targeting domain may comprise a truncation of a gRNA targeting domain. In certain embodiments, the gRNA targeting domain may include the gRNAs set forth in Table 2, Table 10, or Table 15, and the gRNA targeting domain has been truncated from a 5′ end of the gRNA targeting domain. In certain embodiments, the first targeting domain may be the same as or differs by no more than 3 nucleotides from a dgRNA targeting domain set forth in Table 10 or Table 15. In certain embodiments, the second targeting domain differs by no more than 3 nucleotides from a gRNA targeting domain set forth in Table 2, Table 10, or Table 15. In certain embodiments, the indel may alter the CCAAT box target region indel. In certain embodiments, the indel may be a productive indel resulting in an increased level of fetal hemoglobin expression. In certain embodiments, the gRNA, dgRNA, or both may be in vitro synthesized or chemically synthesized.

[0052] In certain embodiments, a cell may include at least one modified allele of the HBG locus generated by any of the methods for altering a cell disclosed herein, in which the modified allele of the HBG locus comprises an alteration of the human HBG1 gene, HBG2, gene, or a combination thereof.

[0053] In certain embodiments, an isolated population of cells may be modified by any of the methods for altering a cells disclosed herein, wherein the population of cells may include a distribution of indels that may be different from an isolated population of cells or their progenies of the same cell type that have not been modified by the method.

[0054] In certain embodiments, a plurality of cells may be generated by any of the methods for altering a cells disclosed herein, in which at least 20%, 30%, 40%, 50%, 60%, 70%, 80%, or 90% of the cells may include an alteration of a sequence in the CCAAT box target region of the human HBG1 gene, HBG2 gene or a combination thereof.

[0055] In certain embodiments, the cells disclosed herein may be used for a medicament. In certain embodiments, the cells may be for use in the treatment of β-hemoglobinopathy. In certain embodiments, β-hemoglobinopathy may be selected from the group consisting of sickle cell disease and beta-thalassemia.

[0056] In one aspect, the disclosure relates to compositions including a plurality of cells generated by a method including a dgRNA disclosed above, in which at least 20%, 30%, 40%, 50%, 60%, 70%, 80% or 90% of the cells include an alteration of a sequence of a CCAAT box target region of the human HBG1 or HBG2 gene or a plurality of cells generated by the method disclosed above, wherein at least 20%, 30%, 40%, 50%, 60%, 70%, 80% or 90% of the cells include an alteration of a sequence of a CCAAT box target region of the human HBG1 or HBG2. In certain embodiments, at least a portion of the plurality of cells may be within an erythroid lineage. In certain embodiments, the plurality of cells may be characterized by an increased level of fetal hemoglobin expression relative to an unmodified plurality of cells. In certain embodiments, the level of fetal hemoglobin may be increased by at least 20%, 30%, 40%, 50%, 60%, 70%, 80% or 90%. In certain embodiments, the compositions may further include a pharmaceutically acceptable carrier.

[0057] In one aspect, the disclosure relates to a population of cells modified by a genome editing system including a dgRNA described above, wherein the population of cells comprise a higher percentage of a productive indel relative to a population of cells not modified by the genome editing system. The disclosure also relates to a population of cells modified by the genome editing system including a dgRNA described above, wherein a higher percentage of the population of cells are capable of differentiating into a population of cells of an erythroid lineage that express HbF relative to a population of cells not modified by the genome editing system. In certain embodiments, the higher percentage may be at least about 15%, at least about 20%, at least about 25%, at least about 30%, or at least about 40% higher. In certain embodiments, the cells may be hematopoietic stem cells. In certain embodiments, the cells may be capable of differentiating into an erythroblast, erythrocyte, or a precursor of an erythrocyte or erythroblast. In certain embodiments, the indel may be created by a repair mechanism other than microhomology-mediated end joining (MMEJ) repair.

[0058] The disclosure also relates to the use of any of the cells disclosed herein in the manufacture of a medicament for treating β-hemoglobinopathy in a subject.

[0059] In one aspect, the disclosure relates to a method of treating a β-hemoglobinopathy in a subject in need thereof, comprising administering to the subject the cells disclosed herein. In certain embodiments, a method of treating a β-hemoglobinopathy in a subject in need thereof, may include administering a population of modified hematopoietic cells to the subject, wherein one or more cells have been altered according to the methods of altering a cell disclosed herein.

[0060] In one aspect, the disclosure relates to a genome editing system, comprising: an RNA-guided nuclease; and a first guide RNA, in which the first guide RNA may comprise a first targeting domain that is complementary to a first sequence on a side of a CCAAT box target region of a human HBG1, HBG2 gene, or a combination thereof, in which the first sequence optionally overlaps the CCAAT box target region of the human HBG1, HBG2 gene, or a combination thereof. In certain embodiments, the genome editing system may further comprise a template nucleic acid encoding an alteration of the CCAAT box target region of a human HBG1, HBG2 gene, or a combination thereof. In certain embodiments, the template nucleic acid may be a single stranded oligodeoxynucleotide (ssODN) or a double stranded oligodeoxynucleotide (dsODN). In certain embodiments, the ssODN may comprise a 5′ homology arm, a replacement sequence, and a 3′ homology arm. In certain embodiments, the homology arms may be symmetrical in length. In certain embodiments, the homology arms may be asymmetrical in length. In certain embodiments, the ssODN may comprise one or more phosphorothioate modifications. In certain embodiments, the one or more phosphorothioate modifications may be at the 5′ end, the 3′ end or a combination thereof. In certain embodiments, the ssODN may be a positive or negative strand. In certain embodiments, the alteration may be a non-naturally occurring alteration. In certain embodiments, the alteration may comprise a deletion of the CCAAT box target region. In certain embodiments, the deletion may comprise a 18 nt deletion, a 11 nt deletion, a 4 nt deletion, a 1 nt deletion, or a combination thereof. In certain embodiments, the CCAAT box target region may comprise a 18 nt target region, a 11 nt target region, a 4 nt target region, a 1 nt target region, or a combination thereof. In certain embodiments, the 5′ homology arm may be about 25 to about 200 or more nucleotides in length, e.g., at about least 25, 50, 75, 100, 125, 150, 175, or 200 nucleotides in length; the replacement sequence may comprise 0 nucleotides in length; and the 3′ homology arm may be about 25 to about 200 or more nucleotides in length, e.g., at least about 25, 50, 75, 100, 125, 150, 175, or 200 nucleotides in length. In certain embodiments, the 5′ homology arm may comprise about 50 to 100 bp, e.g., 55 to 95, 60 to 90, 70 to 90, or 80 to 90 bp, homology 5′ of the 18 nt target region and the 3′ homology arm may comprise about 50 to 100 bp, e.g., 55 to 95, 60 to 90, 70 to 90, or 80 to 90 bp, homology 3′ of the 18 nt target region. In certain embodiments, the ssODN may comprise, may consist essentially of, or may consist of SEQ ID NO:974 or SEQ ID NO:975. In certain embodiments, the 5′ homology arm may comprise about 50 to 100 bp, e.g., 55 to 95, 60 to 90, 70 to 90, or 80 to 90 bp, homology 5′ of the 11 nt target region and the 3′ homology arm may comprise about 50 to 100 bp, e.g., 55 to 95, 60 to 90, 70 to 90, or 80 to 90 bp, homology 3′ of the 11 nt target region. In certain embodiments, the ssODN may comprise, may consist essentially of, or may consist of SEQ ID NO:976 or SEQ ID NO:978. In certain embodiments, the 5′ homology arm may comprise about 50 to 100 bp, e.g., 55 to 95, 60 to 90, 70 to 90, or 80 to 90 bp, homology 5′ of the 4 nt target region and the 3′ homology arm may comprise about 50 to 100 bp, e.g., 55 to 95, 60 to 90, 70 to 90, or 80 to 90 bp, homology 3′ of the 4 nt target region. In certain embodiments, the ssODN may comprise, may consist essentially of, or may consist of a sequence selected from the group consisting of SEQ ID NO:984, SEQ ID NO:985, SEQ ID NO:986, SEQ ID NO:987, SEQ ID NO:988, SEQ ID NO: 989, SEQ ID NO: 990, SEQ ID NO:991, SEQ ID NO:992, SEQ ID NO:993, SEQ ID NO:994, and SEQ ID NO:995. In certain embodiments, the 5′ homology arm may comprise about 50 to 100 bp, e.g., 55 to 95, 60 to 90, 70 to 90, or 80 to 90 bp, homology 5′ of the 1 nt target region and the 3′ homology arm may comprise about 50 to 100 bp, e.g., 55 to 95, 60 to 90, 70 to 90, or 80 to 90 bp, homology 3′ of the 1 nt target region. In certain embodiments, the homology arms may be symmetrical in length. In certain embodiments, the ssODN may comprise, may consist essentially of, or may consist of SEQ ID NO: 982 or SEQ ID NO:983. In certain embodiments, the alteration may be a naturally occurring alteration. In certain embodiments, the alteration may comprise a deletion or mutation of the CCAAT box target region. In certain embodiments, the CCAAT box target region may comprise a 13 nt target region, -117G>A target region, or a combination thereof. In certain embodiments, the alteration may comprise a 13 nt deletion at the 13 nt target region or a substitution from G to A at the -117G>A target region, or a combination thereof. In certain embodiments, the 5′ homology arm may comprise about 50 to 100 bp, e.g., 55 to 95, 60 to 90, 70 to 90, or 80 to 90 bp, homology 5′ of the 13 nt target region and the 3′ homology arm may comprise about 50 to 100 bp, e.g., 55 to 95, 60 to 90, 70 to 90, or 80 to 90 bp, homology 3′ of the 13 nt target region. In certain embodiments, the ssODN may comprise, may consist essentially of, or may consist of SEQ ID NO:977 or SEQ ID NO:979. In certain embodiments, the 5′ homology arm may comprise about 50 to 100 bp, e.g., 55 to 95, 60 to 90, 70 to 90, or 80 to 90 bp, homology 5′ of the 13 nt target region and the 3′ homology arm may comprise about 50 to 100 bp, e.g., 55 to 95, 60 to 90, 70 to 90, or 80 to 90 bp, homology 3′ of the 13 nt target region. In certain embodiments, the ssODN may comprise, may consist essentially of, or may consist of SEQ ID NO:980 or SEQ ID NO:981. In certain embodiments, the RNA-guided nuclease may be an S. pyogenes Cas9. In certain embodiments, the RNA-guided nuclease may be a Cpf1 variant as disclosed herein. In certain embodiments, the first targeting domain may differ by no more than 3 nucleotides from a targeting domain listed in Table 7, Table 18, Table 19 or a gRNA in Table 12, Table 19. In certain embodiments, the genome editing system may further comprise a second guide RNA, wherein the second guide RNA may comprise a second targeting domain that may be complementary to a second sequence on a side of a CCAAT box target region of a human HBG1, HBG2 gene, or a combination thereof, wherein the second sequence optionally overlaps the CCAAT box target region of the human HBG1, HBG2 gene, or a combination thereof. In certain embodiments, the RNA-guided nuclease may be a nickase, and optionally lacks RuvC activity. In certain embodiments, the genome editing system may comprise first and second RNA-guided nucleases. In certain embodiments, the first and second RNA-guided nucleases may be complexed with the first and second guide RNAs, respectively, forming first and second ribonucleoprotein complexes. In certain embodiments, the genome editing system may further comprise a third guide RNA; and optionally a fourth guide RNA, wherein the third and fourth guide RNAs may comprise third and fourth targeting domains complimentary to third and fourth sequences on opposite sides of positions of a GATA1 binding motif in BCL11A erythroid enhancer (BCL11Ae) of a human BCL11A gene, wherein one or both of the third and fourth sequences optionally overlaps the GATA1 binding motif in BCL11Ae of the human BCL11A gene. In certain embodiments, the genome editing system may further comprise a nucleic acid template encoding a deletion of the GATA1 binding motif in BCL11Ae. In certain embodiments, the RNA-guided nuclease may be an S. pyogenes Cas9. In certain embodiments, the RNA-guided nuclease may be a nickase, and optionally lacks RuvC activity. In certain embodiments, the third targeting domain may be complimentary to a sequence within 1000 nucleotides upstream of the GATA1 binding motif in BCL11Ae. In certain embodiments, the third targeting domain may be complimentary to a sequence within 100 nucleotides upstream of the GATA1 binding motif in BCL11Ae. In certain embodiments, one of the third and fourth targeting domains may be complimentary to a sequence within 100 nucleotides downstream of the GATA1 binding motif in BCL11Ae. In certain embodiments, the fourth targeting domain may be complimentary to a sequence within 50 nucleotides downstream of the GATA1 binding motif in BCL11Ae. In certain embodiments, at least one of the third and fourth targeting domains may differ by no more than 3 nucleotides from a targeting domain listed in Table 9. In certain embodiments, genome editing system may comprise first and second RNA-guided nucleases. In certain embodiments, the first and second RNA-guided nucleases may be complexed with the third and fourth guide RNAs, respectively, forming third and fourth ribonucleoprotein complexes.

[0061] In one aspect, the disclosure relates to a method of altering a cell comprising contacting a cell with a genome editing system. In certain embodiments, the step of contacting the cell with the genome editing system may comprise contacting the cell with a solution comprising first and second ribonucleoprotein complexes. In certain embodiments, the step of contacting the cell with the solution may further comprise electroporating the cells, thereby introducing the first and second ribonucleoprotein complexes into the cell. In certain embodiments, the method of altering a cell may further comprise contacting the cell with a genome editing system, wherein the step of contacting the cell with the genome editing system may comprise contacting the cell with a solution comprising first, second, third, and optionally, fourth ribonucleoprotein complexes. In certain embodiments, the step of contacting the cell with the solution may further comprise electroporating the cells, thereby introducing the first, second, third, and optionally, fourth ribonucleoprotein complexes into the cell. In certain embodiments, the cell may be capable of differentiating into an erythroblast, erythrocyte, or a precursor of an erythrocyte or erythroblast. In certain embodiments, the cell may be a CD34⁺ cell.

[0062] In one aspect, the disclosure relates to a CRISPR-mediated method of altering a cell, comprising: introducing a first DNA single strand break (SSB) or double strand break (DSB) within a genome of the cell between positions c.-106 to -120 of a human HBG1 or HBG2 gene; and optionally introducing a second SSB or DSB within the genome of the cell between positions c.-106 to -120 of the human HBG1 or HBG2 gene, wherein the first and second SSBs or DSBs may be repaired by the cell in a manner that alters a CCAAT box target region of the human HBG1 or HBG2 gene. In certain embodiments, the first and second SSBs or DSBs may be repaired by the cell in a manner that results in the alteration of a CCAAT box target region of the human HBG1 or HBG2 gene. In certain embodiments, the CRISPR-mediated method may further comprise a template nucleic acid encoding the alteration of the CCAAT box target region of a human HBG1, HBG2 gene, or a combination thereof. In certain embodiments, the template nucleic acid may be a single stranded oligodeoxynucleotide (ssODN). In certain embodiments, the ssODN may comprise a 5′ homology arm, a replacement sequence, and a 3′ homology arm. In certain embodiments, the ssODNs may be a positive or negative strand. In certain embodiments, the alteration may be a non-naturally occurring alteration. In certain embodiments, the first and second SSBs or DSBs may be repaired by the cell in a manner that results in the formation of at least one of an indel, a deletion, or an insertion in the CCAAT box target region of the human HBG1 or HBG2 gene. In certain embodiments, the CCAAT box target region may comprise a 18 nt target region, a 11 nt target region, a 4 nt target region, a 1 nt target region, or a combination thereof. In certain embodiments, the 5′ homology arm may be about 25 to about 200 nucleotides or more in length, e.g., at least about 25, 50, 75, 100, 125, 150, 175, or 200 nucleotides in length; the replacement sequence may comprise 0 nucleotides in length; and the 3′ homology arm may be about 25 to about 200 nucleotides or more in length, e.g., at least about 25, 50, 75, 100, 125, 150, 175, or 200 nucleotides in length. In certain embodiments, the 5′ homology arm may comprise about 50 to 100 bp, e.g., 55 to 95, 60 to 90, 70 to 90, or 80 to 90 bp, homology 5′ of the 18 nt target region, the 11 nt target region, the 4 nt target region, or the 1 nt target region and the 3′ homology arm may comprise about 50 to 100 bp, e.g., 55 to 95, 60 to 90, 70 to 90, or 80 to 90 bp, homology 3′ of 18 nt target region, the 11 nt target region, the 4 nt target region, or the 1 nt target region. In certain embodiments, the ssODN may comprise, may consist essentially of, or may consist of a sequence selected from the group consisting of SEQ ID NO:974, SEQ ID NO:975, SEQ ID NO:976, SEQ ID NO: 978, SEQ ID NO:984, SEQ ID NO:985, SEQ ID NO:986, SEQ ID NO:987, SEQ ID NO:988, SEQ ID NO:989, SEQ ID NO:990, SEQ ID NO:991, SEQ ID NO:992, SEQ ID NO:993, SEQ ID NO: 994, SEQ ID NO:995, SEQ ID NO:982 and SEQ ID NO:983. In certain embodiments, the alteration may be a non-naturally occurring alteration. In certain embodiments, the first and second SSBs or DSBs may be repaired by the cell in a manner that results in the formation of at least one of an indel, a deletion, or an insertion in the CCAAT box target region of the human HBG1 or HBG2 gene. In certain embodiments, the CCAAT box target region may comprise a 13 nt target region, -117G>A target region, or a combination thereof. In certain embodiments, the alteration may comprise a 13 nt deletion at the 13 nt target region or a substitution from G to A at the -117G>A target region, or a combination thereof. In certain embodiments, the 5′ homology arm may comprise about 50 to 100 bp, e.g., 55 to 95, 60 to 90, 70 to 90, or 80 to 90 bp, homology 5′ of the 13 nt target region or the -117G>A target region and the 3′ homology arm may comprise about 50 to 100 bp, e.g., 55 to 95, 60 to 90, 70 to 90, or 80 to 90 bp, homology 3′ of the 13 nt target region or the -117G>A target region. In certain embodiments, the ssODN may comprise, may consist essentially of, or may consist of a sequence selected from the group consisting of SEQ ID NO:977 or SEQ ID NO:979. SEQ ID NO:980 or SEQ ID NO:981.

[0063] In one aspect, the disclosure relates to a composition that may comprise a plurality of cells generated by a method of altering a cell disclosed herein, wherein at least 20%, 30%, 40%, 50%, 60%, 70%, 80% or 90% of the cells may comprise an alteration of a sequence of a CCAAT box target region of the human HBG1 gene, HBG2 gene, or a combination thereof. In certain embodiments, the alteration may comprise a 18 nt deletion, a 11 nt deletion, a 4 nt deletion, a 1 nt deletion, a 13 nt deletion, a substitution from G to A at the -117, of the human HBG1 gene, HBG2 gene, or a combination thereof. In certain embodiments, at least a portion of the plurality of cells may be within an erythroid lineage. In certain embodiments, the plurality of cells may be characterized by an increased level of fetal hemoglobin expression relative to an unmodified plurality of cells. In certain embodiments, the level of fetal hemoglobin may be increased by at least 20%, 30%, 40%, 50%, 60%, 70%, 80% or 90%. In certain embodiments, the composition may further comprise a pharmaceutically acceptable carrier.

[0064] In one aspect, the disclosure relates to a cell comprising a synthetic genotype generated by a method of altering a cell disclosed herein, wherein the cell may comprise a 18 nt deletion, a 11 nt deletion, a 4 nt deletion, a 1 nt deletion, a 13 nt deletion, a substitution from G to A at the -117, of the human HBG1 gene, HBG2 gene, or a combination thereof.

[0065] In one aspect, the disclosure relates to a cell comprising at least one allele of the HBG locus generated by a method of altering a cell disclosed herein, wherein the cell may encode a 18 nt deletion, a 11 nt deletion, a 4 nt deletion, a 1 nt deletion, a 13 nt deletion, a substitution from G to A at the -117, of the human HBG1 gene, HBG2 gene, or a combination thereof.

[0066] In one aspect, the disclosure relates to an AAV vector that may comprise a template nucleic acid encoding a non-naturally occurring alteration of a CCAAT box target region of a human HBG1, HBG2 gene, or a combination thereof. In certain embodiments, the template nucleic acid may be a single stranded oligodeoxynucleotide (ssODN). In certain embodiments, the CCAAT box target region may comprise a 18 nt target region, a 11 nt target region, a 4 nt target region, a 1 nt target region, or a combination thereof. In certain embodiments, the ssODN may comprise a 5′ homology arm, a replacement sequence, and a 3′ homology arm. In certain embodiments, the 5′ homology arm may be about 25 to about 200 or more nucleotides in length, e.g., at least about 25, 50, 75, 100, 125, 150, 175, or 200 nucleotides in length; the replacement sequence may comprise 0 nucleotides in length; and the 3′ homology arm may be about 25 to about 200 or more nucleotides in length, e.g., at least about 25, 50, 75, 100, 125, 150, 175, or 200 nucleotides in length. In certain embodiments, the 5′ homology arm may comprise about 50 to 100 bp, e.g., 55 to 95, 60 to 90, 70 to 90, or 80 to 90 bp, homology 5′ of the 18 nt target region, the 11 nt target region, the 4 nt target region, or the 1 nt target region and the 3′ homology arm may comprise about 50 to 100 bp, e.g., 55 to 95, 60 to 90, 70 to 90, or 80 to 90 bp, homology 3′ of 18 nt target region, the 11 nt target region, the 4 nt target region, or the 1 nt target region. In certain embodiments, the ssODN may comprise, may consist essentially of, or may consist of a sequence selected from the group consisting of SEQ ID NO:974-976, SEQ ID NO:978, SEQ ID NO:982-995.

[0067] In one aspect, the disclosure relates to a nucleotide sequence comprising a template nucleic acid encoding a non-naturally occurring alteration of a CCAAT box target region of a human HBG1, HBG2 gene, or a combination thereof. In certain embodiments, the template nucleic acid may be a single stranded oligodeoxynucleotide (ssODN) or a double stranded oligodeoxynucleotide (dsODN) comprising the alteration. In certain embodiments, the CCAAT box target region may comprise a 18 nt target region, a 11 nt target region, a 4 nt target region, a 1 nt target region, or a combination thereof. In certain embodiments, the ssODN may comprise a 5′ homology arm, a replacement sequence, and a 3′ homology arm. In certain embodiments, the 5′ homology arm may be about 25 to about 200 or more nucleotides in length, e.g., at least about 25, 50, 75, 100, 125, 150, 175, or 200 nucleotides in length; the replacement sequence may comprise 0 nucleotides in length; and the 3′ homology arm may be about 25 to about 200 or more nucleotides in length, e.g., at least about 25, 50, 75, 100, 125, 150, 175, or 200 nucleotides in length. In certain embodiments, the 5′ homology arm may comprise about 50 to 100 bp, e.g., 55 to 95, 60 to 90, 70 to 90, or 80 to 90 bp, homology 5′ of the 18 nt target region, the 11 nt target region, the 4 nt target region, or the 1 nt target region and the 3′ homology arm may comprise about 50 to 100 bp, e.g., 55 to 95, 60 to 90, 70 to 90, or 80 to 90 bp, homology 3′ of 18 nt target region, the 11 nt target region, the 4 nt target region, or the 1 nt target region. In certain embodiments, the ssODN may comprise, may consist essentially of, or may consist of a sequence selected from the group consisting of SEQ ID NO:974-976, SEQ ID NO:978, SEQ ID NO:982-995.

[0068] In one aspect, the disclosure relates to a cell comprising a synthetic genotype, wherein the cell may comprise a 18 nt deletion, a 11 nt deletion, a 4 nt deletion, a 1 nt deletion, a 13 nt deletion, a substitution from G to A at the -117, of the human HBG1 gene, HBG2 gene, or a combination thereof.

[0069] In one aspect, the disclosure relates to a composition, comprising a population of cells generated by a method of altering a cell disclosed herein, wherein the cells comprise a higher frequency of an alteration of a sequence of a CCAAT box target region of the human HBG1 gene, HBG2 gene, or a combination thereof relative to an unmodified population of cells. In certain embodiments, the higher frequency is at least about 10%, 20%, 30%, 40%, 50%, 60%, 70%, 80% or 90% higher. In certain embodiments, the alteration comprises a 18 nt deletion, a 11 nt deletion, a 4 nt deletion, a 1 nt deletion, a 13 nt deletion, a substitution from G to A at the -117, of the human HBG1 gene, HBG2 gene, or a combination thereof. In certain embodiments, at least a portion of the population of cells are within an erythroid lineage.

[0070] This listing is intended to be exemplary and illustrative rather than comprehensive and limiting. Additional aspects and embodiments may be set out in, or apparent from, the remainder of this disclosure and the claims.

### BRIEF DESCRIPTION OF THE DRAWINGS

[0071] The accompanying drawings are intended to provide illustrative, and schematic rather than comprehensive, examples of certain aspects and embodiments of the present disclosure. The drawings are not intended to be limiting or binding to any particular theory or model, and are not necessarily to scale. Without limiting the foregoing, nucleic acids and polypeptides may be depicted as linear sequences, or as schematic two-or three-dimensional structures; these depictions are intended to be illustrative rather than limiting or binding to any particular model or theory regarding their structure.

[0072] FIG. 1 depicts, in schematic form, HBG1 and HBG2 gene(s) in the context of the β-globin gene cluster on human chromosome 11. FIG. 1. Each gene in the β-globin gene cluster is transcriptionally regulated by a proximal promoter. While not wishing to be bound by any particular theory, it is generally thought that A_{γ} and/or G_{γ} expression is activated by engagement between the proximal promoter with the distal strong erythroid-specific enhancer, the locus control region (LCR). Long-range transactivation by the LCR is thought to be mediated by alteration of chromatin configuration/confirmation. The LCR is marked by 4 erythroid specific Dnase I hypersensitive sites (HS1-4) and 2 distal enhancer elements (5′ HS and 3′ HS1). β-like gene globin gene expression is regulated in a developmental stage-specific manner, and expression of globin genes changes coincide with changes in the main site of blood production.

[0073] FIGS. 2A-2B depict HBG1 and HBG2 genes, coding sequences (CDS) and small deletions and point mutations in and upstream of the HBG1 and HBG2 proximal promoters that have been identified in patients and associated with elevation of fetal hemoglobin (HbF). Core elements within the proximal promoters (CAAT box, 13 nt sequence) that have been deleted in some patients with hereditary persistence of fetal hemoglobin (HPFH). The ‘target sequence’ region of each locus, which has been screened for gRNA binding target sites, is also identified.

[0074] FIGS. 3A-C show data from gRNA screening for incorporation of the 13 nt deletion in human K562 erythroleukemia cells. FIG. 3A Gene editing as determined by T7E1 endonuclease assay analysis (referred to interchangeably as a “T7E1 analysis”) of HBG1 and HBG2 locus-specific PCR products amplified from genomic DNA extracted from K562 cells after electroporation with DNA encoding S. pyogenes-specific gRNAs and plasmid DNA encoding S. pyogenes Cas9. FIG. 3B Gene editing as determined by DNA sequence analysis of PCR products amplified from the HBG1 locus in genomic DNA extracted from K562 cells after electroporation with DNA encoding the indicated gRNA and Cas9 plasmid. FIG. 3C Gene editing as determined by DNA sequence analysis of PCR products amplified from the HBG2 locus in genomic DNA extracted from K562 cells after electroporation with DNA encoding the indicated gRNA and Cas9 plasmid. For FIG. 3B-C, the types of editing events (insertions, deletions) and subtypes of deletions (13 nt target partially [12 nt HPFH] or fully [13-26 nt HPFH] deleted, other sequences deleted [other deletions]) are indicated by the differently shaded/patterned bars.

[0075] FIGS. 4A-C depict results of gene editing in human cord blood (CB) and human adult CD34+ cells after electroporation with RNPs complexed to in vitro transcribed S. pyogenes gRNAs that target a specific 13 nt sequence for deletion (HBG sgRNAs Sp35 and Sp37). FIG. 4A depicts the percentage of indels detected by T7E1 analysis of HBG1 and HBG2 specific PCR products amplified from gDNA extracted from CB CD34⁺ cells treated with the indicated RNPs or donor matched untreated control cells (n=3 CB CD34⁺ cells, 3 separate experiments). Data shown represent the mean and error bars correspond to standard deviation across the 3 separate donors/experiments. FIG. 4B depicts the percentage of indels detected by T7E1 analysis of HBG2 specific PCR product amplified from gDNA extracted from CB CD34⁺ cells or adult CD34⁺ cells treated with the indicated RNPs or donor matched untreated control cells (n=3 CB CD34⁺ cells, n=3 mobilized peripheral blood (mPB) CD34⁺ cells, 3 separate experiments). Data shown represent the mean and error bars correspond to standard deviation across the 3 separate donors/experiments. FIG. 4C (Top panel) depicts indels as detected by T7E1 analysis of HBG2 PCR products amplified from gDNA extracted from human CB CD34⁺ cells electroporated with HBG Sp35 RNP or HBG Sp37 RNP+/−ssODN (unmodified or with PhTx modified 5′ and 3′ ends). The lower left panel shows the level of gene editing as determined by Sanger DNA sequence analysis of gDNA from cells edited with HBG Sp37 RNP and ssODN. The lower right panel shows the specific types of deletions detected within total deletions.

[0076] FIGS. 5A-B depict gene editing of HBG in adult human mobilized peripheral blood (mPB) CD34⁺ cells and induction of fetal hemoglobin in erythroid progeny of RNP treated cells after electroporation of mPB CD34⁺ cells with HBG Sp37 RNP+/−ssODN encoding the 13 nt deletion. FIG. 5A depicts the percentage of indels detected by T7E1 analysis of HBG2 PCR product amplified from gDNA extracted from mPB CD34⁺ cells treated with the RNP or donor matched untreated control cells. FIG. 5B depicts the fold change in HBG mRNA expression in day 7 erythroblasts that were differentiated from RNP treated and untreated donor matched control mPB CD34⁺ cells. mRNA levels are normalized to GAPDH and calibrated to the levels detected in untreated controls on the corresponding days of differentiation.

[0077] FIGS. 6A-B depict the ex vivo differentiation potential of RNP treated and untreated mPB CD34⁺ cells from the same donor. FIG. 6A shows hematopoietic myeloid/erythroid colony forming cell (CFC) potential, where the number and subtype of colonies are indicated (GEMM: granulocyte-erythroid-monocyte-macrophage colony, E: erythroid colony, GM: granulocyte-macrophage colony, M: macrophage colony, G: granulocyte colony). FIG. 6B depicts the percentage of Glycophorin A expressed over the time course of erythroid differentiation as determined by flow cytometry analysis at the indicated time points and for the indicated samples.

[0078] FIG. 7A depicts indels detected byT7E1 analysis of HBG PCR product amplified from gDNA extracted from human mPB CD34⁺ cells treated with HBG RNPs (D10A paired nickases). For a subset of samples, cells also received ssODN encoding the 13 nt deletion plus silent SNPs to monitor for HDR (ssODN). FIG. 7B depicts DNA sequencing analysis for select subset of samples shown in FIG. 7A. The indels were subdivided according to the type of indel (insertion, 13 nt deletion, or other deletion).

[0079] FIG. 8A depicts the indels at the HBG target site after electroporation of mPB CD34⁺ cells with the indicated pairs of gRNAs complexed in D10A nickase and WT RNP pairs. FIG. 8B depicts the large deletion events (e.g. deletion of HBG2) after electroporation of mPB CD34⁺ cells with the indicated pairs of gRNAs complexed in D10A nickase and WT RNPs. FIG. 8C depicts DNA sequencing analysis and the subtypes of events (insertions, deletions) detected in gDNA from mPB CD34⁺ cells treated with paired D10A nickase pairs. FIG. 8D depicts DNA sequencing analysis and the subtypes of events (insertions, deletions) detected in gDNA from mPB CD34⁺ cells treated with paired WT RNP pairs.

[0080] FIG. 9 depicts the summary of HbF protein and mRNA expression in the progeny of mPB CD34⁺ cells treated with paired RNPs targeting HBG, for the experiments shown in FIGS. 7 and 8. HbF protein (by HPLC analysis) and HbF mRNA expression (ddPCR analysis) were evaluated in erythroid progeny of RNP treated human mPB CD34⁺ cells (background levels of HbF detected in donor matched untreated controls were subtracted from the levels detected in progeny of RNP treated CD34⁺ cells).

[0081] FIGS. 10A-H depict the indel frequencies and ex vivo and in vivo short-term hematopoietic potential of CD34⁺ cells after treatment with different concentrations (0, 2.5, 3.7 μM) of paired D10A nickase RNPs (SpA+Sp85). Indels were evaluated by T7E1 analysis (FIG. 10A) and by Illumina sequencing analysis (insertions and deletions, FIG. 10B). FIG. 10C depicts the % of HbF protein detected by HPLC analysis (% HbF=100%×HbF/(HbF+HbA). FIG. 10D depicts the hematopoietic activity of the RNP treated and donor matched untreated control CD34⁺ cells in colony forming cell (CFC) assays. CFCs shown are per thousand CD34⁺ cells plated. FIG. 10E depicts human blood CD45⁺ cell reconstitution of the peripheral blood in immunodeficient mice (NSG) 1 month after transplantation with donor matched human mPB CD34⁺ that were either untreated (0 μM), or treated with one of two doses (2.5 and 3.75 μM) of D10A RNP and paired gRNAs. FIG. 10F depicts human blood CD45⁺ cell reconstitution of the peripheral blood in immunodeficient mice (NSG) 2 months after transplantation. FIGS. 10G and 10H depict the lineage distributions following human CD45⁺ blood cell reconstitution of NSG mice at 1 month (FIG. 10G) and 2 months (FIG. 10H).

[0082] FIG. 11A correlates HbF levels as assayed by HPLC and indel frequency as assessed by T7E1 analysis for two D10A nickase RNP pairs (SP37+SPB and SP37+SPA) delivered at the indicated concentrations to mPB CD34⁺ cells. HbF levels were analyzed in erythroid progeny (day 18) of edited CD34⁺ cells. HbF protein detected in donor-matched untreated controls were subtracted from edited samples. FIG. 11B depicts indel rates overlaid on hematopoietic colony forming cell (CFC) activity associated with CD34⁺ cells treated with the indicated D10A nickase pairs or untreated controls. FIG. 11C depicts human CD45⁺ blood cell reconstitution of immunodeficient NSG mice one month after transplantation of mPB CD34⁺ cells treated with indicated D10 RNP nickase pairs at the concentrations given or donor matched untreated controls. FIG. 11D depicts the human blood lineage distribution detected in the human CD45⁺ fraction in mouse peripheral blood one month post-transplant.

[0083] FIG. 12 depicts a target site for derepression of HbF, the GATA1 motif of the +58 DNase I hypersensitive site (DHS) erythroid specific enhancer of BCL11A (BCL11Ae) (genomic coordinates: chr2: 60,495,265 to 60,495,270).

[0084] FIG. 13A depicts the percentage of indels detected by T7E1 endonuclease analysis of BCL11A PCR products amplified from gDNA extracted from CB CD34⁺ cells treated with the indicated RNP+/−ssODN or donor matched untreated control cells. Data shown represent the mean of three 3 separate donors/experiments. FIG. 13B depicts indels detected by T7E1 endonuclease analysis of BCL11A PCR products amplified from gDNA extracted from CB CD34⁺ cells treated with the indicated WT RNP (single gRNA targeting the BCL11A erythroid enhancer complexed to WT S. pyogenes Cas9 having both RuvC and HNH activity) or paired nickase RNP (paired gRNAs targeting the BCLILA erythroid enhancer complexed to S. pyogenes Cas9 nickases sharing the same HNH single stranded cutting activity (e.g. D10A), as well as the hematopoietic activity of cells in each condition.

[0085] FIG. 14A depicts the editing frequency of BCL11Ae (using single gRNA approach targeting the GATA1 motif) in adult human BM CD34⁺ cells. FIG. 14B depicts the monoallelic and bialleleic editing detected in hematopoietic colonies (GEMMs, clonal progeny of BCL11Ae RNP treated CD34⁺ cells) as determined by DNA sequencing analysis. FIG. 14C depicts the kinetics of erythroblast maturation (enucleation as determined by DRAQ5 cells detected by flow cytometry analysis). FIG. 14D depicts the acquisition of erythroid phenotype (Glycophorin A⁺ cells) in differentiated control and RNP-treated BM CD34⁺ cells, while FIG. 14E shows the fold increase in HbF+ cells as determined by flow cytometry analysis relative to HbF+ cells in untreated donor matched control samples.

[0086] FIGS. 15A-C depict gene editing of BCL11Ae in adult human mPB CD34⁺ cells and induction of fetal hemoglobin in erythroid progeny of RNP and ssODN treated cells after electroporation of mPB CD34⁺ cells with BCL11Ae RNP+nonspecific ssODN. FIG. 15A depicts the percentage of indels detected by T7E1 analysis of HBG2 PCR product amplified from gDNA extracted from mPB CD34⁺ cells treated with the BCL11Ae RNP and nonspecific ssODN or donor matched untreated control cells. FIG. 15B depicts the fold change in HBG mRNA expression in day 10 erythroblasts that were differentiated from BCL11Ae RNP treated and untreated donor matched control mPB CD34⁺ cells (mRNA levels are normalized to GAPDH and calibrated to the levels detected in untreated controls on the corresponding days of differentiation). FIG. 15C depicts the percentage of Glycophorin A expressed over the time course of erythroid differentiation of mPB CD34⁺ cells+/−treatment with BCL11Ae RNP and nonspecific ssODN, as determined by flow cytometry analysis at the indicated time points and for the indicated samples.

[0087] FIG. 16 depicts the percentage of indels detected by next generation sequencing (NGS) of the HBG PCR product amplified from gDNA extracted from hematopoietic stem/progenitor cells (HSPCs) treated with Cas9 complexed with the chemically synthesized guide RNA OLI7066 (SEQ ID NO:970, Table 10) (“OLI7066-RNP”) at a concentration of 16 μM. Various indels were identified including HBG Δ-102:-121, HBG Δ-114:-124, HBG Δ-116, HBG-114+T, HBG-116+G, HBG Δ-112:-115, HBG Δ-113:-115, HBG Δ-114:-115, HBG Δ-115, HBG Δ-102:-114 (the naturally occurring 13 nt deletion).

[0088] FIGS. 17A-D depict expression levels of G gamma (Gγ)-globin, A gamma (Aγ)-globin chain (or AG gamma (AGγ)-globin resulting from the 4.9 kb deletion) as determined by [gamma chain]/[all-gamma chains+beta chain] compared to relative indels carried at HBG1 or HBG2 as measured by UPLC analysis in the erythroid progeny of single HSPC that were electroporated with Cas9 complexed with the gRNA OLI7066 (SEQ ID NO:970) (“OLI7066-RNP”) (Table 10). FIG. 17A depicts AgammaT (AγT)-globin chain expression as determined by [AγT-globin chain]/[all-gamma chains+beta chain] for clones carrying the indicated indels on the corresponding HBG1 allele (HBG1 Δ-115, HBG1 Δ-114:-115, HBG1 Δ-113:-115, HBG1 Δ-112:-115, HBG1 Δ-102:-114, HBG1 Δ-104:-121, HBG1 Δ-116). FIG. 17B depicts G gamma (Gγ)-globin chain expression as determined by [Gγ-gamma chain]/[all-gamma chains+beta chain] for clones carrying the indicated indels on an HBG2 allele (HBG2 Δ-115, HBG2 Δ-114:-115, HBG2 Δ-113:-115, HBG2 Δ-112:-115, HBG2 Δ-102:-114, HBG2 Δ-104:-121, HBG2 Δ-116). To insure that the analysis of G gamma (Gγ)-globin induction is the result of a single edited allele, only clones with monoallelic editing of HBG2, or with a deletion of one of the HBG2 allele were analyzed (resulting from the 4.9 kb deletion). FIG. 17C depicts AG gammaT (AGγT)-globin chain expression as determined by [AGγT-gamma chain]/[all-gamma chains+beta chain] for clones carrying the indicated indels on the corresponding HBG1/2 allele (HBG1/2 Δ-115, HBG1/2 Δ-114:-115, HBG1/2 Δ-113:-115, HBG1/2 Δ-112:-115, HBG1/2 Δ-102:-114, HBG1/2 Δ-104:-121, HBG1/2 Δ-116). FIG. 17D depicts AGgammaI (AGγI)-globin chain expression as determined by [AGγI-gamma chain]/[all-gamma chains+beta chain] for clones carrying the indicated indels on the corresponding HBG1/2 allele (HBG1/2 Δ-115, HBG1/2 Δ-114:-115, HBG1/2 Δ-113:-115, HBG1/2 Δ-112:-115, HBG1/2 Δ-102:-114, HBG1/2 Δ-104:-121, HBG1/2 Δ-116).

[0089] FIG. 18 depicts, in schematic form, HBG1 and HBG2 gene(s) in the context of the β-globin gene cluster on human chromosome 11. The schematic shows the CCAAT box target sites at HBG1 and HBG2. Due to the homology within this region, a single guide RNA, such as OLI8394 (SEQ ID NO: 971), complexed to an RNA nuclease (e.g., Cas9) will cut at both HBG1 and HBG2. The editing outcomes following delivery of Cas9 complexed to OLI8394 (“OLI8394-RNP”) vary and result in different size deletions or insertions. Single stranded oligodeoxynucleotides (ssODN) were designed to provide a template that copies the desired indel signature at the CCAAT box (Table 11). The ssODN “encodes” the respective deletion with sequence homology arms flanking the absent sequence to create a perfect deletion.

[0090] FIGS. 19A-G depict results from gene editing of the CCAAT box target region of HBG of adult human CD34+ cells from mPB (“mPB CD34+ cells”) electroporated with 2 μM OLI8394-RNP or OLI7066-RNP and 2.5 μM of various ssODNs (Table 11). FIG. 19A depicts the percentage of indels detected by sequencing the HBG PCR product 72 hours after electroporation with OLI8394-RNP and SSODN OLI16413 (“−11 nt+strand”) or ssODN OLI16411 (“−11 nt-strand”). FIG. 19B depicts the percentage of the precise “−11 nt deletion” to the total indels detected by sequencing the HBG PCR product 72 hours after electroporation with OLI8394-RNP and ssODN OLI16413 (“−11 nt+strand”) or SSODN OLI16411 (“−11 nt-strand”). FIG. 19C depicts the percentage of indels detected by sequencing the HBG PCR product 72 hours after electroporation with OLI8394-RNP and ssODN OLI16430 (“−4 nt+strand”) or ssODN OLI16424 (“−4 nt-strand”). The percentage of the precise-4 nt deletion (i.e., Δ-112:-115) is distinguished from other indels. FIG. 19D depicts the percentage of indels detected by sequencing the HBG PCR product 72 hours after electroporation with OLI8394-RNP and ssODN OLI16418 (“−1 nt+strand”) or ssODN OLI16417 (“−1 nt-strand”). The percentage of the precise-1 nt deletion (i.e., Δ-116) is distinguished from other indels. FIG. 19E depicts the percentage of indels detected by sequencing the HBG PCR product 72 hours after electroporation with OLI8394-RNP and ssODN OLI16409 (“−18 nt+strand”) or ssODN OLI16410 (“−18 nt-strand”). The percentage of the precise-18 nt deletion (i.e., Δ-104:-121) is distinguished from other indels. FIG. 19F depicts the percentage of indels detected by sequencing the HBG PCR product 72 hours after electroporation with OLI7066-RNP and ssODN OLI16414 (“−13 nt+strand”) or ssODN OLI16412 (“−13 nt-strand”). The percentage of the precise-13 nt deletion (i.e., Δ-102:-114) is distinguished from other indels FIG. 19G depicts the percentage of indels detected by sequencing the HBG PCR product 72 hours after electroporation with OLI8394-RNP and SSODN OLI16416 (“−117 G>A+strand”) or ssODN OLI16415 (“−117 G>A-strand”). The percentage of reads with the -117 G>A substitution, with or without indels are distinguished from other reads.

[0091] FIGS. 20A-B depict expression levels of gamma-globin chains over total beta-like globin chains (gamma chains/[gamma chains+beta chain]) as measured by UPLC analysis on the erythroid progeny of mPB CD34+ cells that were electroporated with OLI8394-RNP or OLI7066-RNP and various ssODNs (Table 11). FIG. 20A depicts the percentage of gamma-globin chains over total beta-like globin chains (gamma chains/[gamma chains+beta chain]) as measured by UPLC after electroporation with (i) OLI8394-RNP and OLI7066-RNP alone, (ii) OLI8394-RNP and ssODN OLI16430 (“−4 nt+strand”), sSODN OLI16424 (“−4 nt-strand”), ssODN OLI16413 (“−11 nt+strand”), or ssODN OLI16411 (“−11 nt -strand”), and (iii) OLI7066-RNP and ssODN OLI16414 (“−13 nt+strand”) or ssODN OLI16412 (“−13 nt-strand”). FIG. 20B depicts the percentage of gamma-globin chains over total beta-like globin chains (gamma chains/[gamma chains+beta chain]) as measured by UPLC after electroporation with OLI8394-RNP and ssODN OLI16418 (“−1 nt+strand”), ssODN OLI16417 (“−1 nt-strand”), ssODN OLI16416 (“−117 G>A+strand”), ssODN OLI16415 (“−117 G>A-strand”), ssODN OLI16409 (“−18 nt+strand”), or SSODN OLI16410 (“−18 nt-strand”).

[0092] FIGS. 21A-D depict results from gene editing from mPB CD34+ cells electroporated with 2 μM OLI8394-RNP and ssODN OLI16424 (“−4 nt-strand”) (Table 11) at doses ranging from 0.625 μM to 10 μM. FIG. 21A depicts the percentage of indels detected by sequencing the HBG PCR product 72 hours after electroporation. FIG. 21B depicts frequency of 4.9 kb deletions detected by ddPCR between HBG1 and HBG2 after electroporation. FIG. 21C depicts the percentage viability of adult human CD34+ cells from mPB 48 hours after electroporation. FIG. 21D depicts the percentage of gamma-globin chains over total beta-like globin chains (gamma chains/[gamma chains+beta chain]) as measured by UPLC analysis of the cell lysates from the erythroid progeny of electroporated cells.

[0093] FIGS. 22A-D depict results from gene editing from mPB CD34+ cells electroporated with indicated doses of OLI8394-RNP and indicated doses of ssODN OLI16424 (“−4 nt-strand”) (Table 11). FIG. 22A depicts the percentage of indels detected by sequencing the HBG PCR product 72 hours after electroporation with indicated doses (2, 4, or 8 μM) of OLI8394-RNP and indicated doses (0, 1.25, 2.5, or 5 μM) of ssODN OLI16424 (“−4 nt-strand”). FIG. 22B depicts the percentage of -4 nt deletions (“−112:-115 deletions”) detected by next generation sequencing (NGS) of the HBG PCR product after electroporation with indicated doses (2, 4, or 8 μM) of OLI8394-RNP and indicated doses (0, 1.25, 2.5, or 5 μM) of ssODN OLI16424 (“−4 nt-strand”). FIG. 22C depicts frequency of 4.9 kb deletions between HBG1 and HBG2 after electroporation with the indicated doses (2, 4, or 8 μM) of OLI8394-RNP and indicated doses (0, 1.25, 2.5, or 5 μM) of ssODN OLI16424 (“−4 nt-strand”). Deletions were measured via ddPCR. FIG. 22D depicts the percentage of gamma-globin chains over total beta-like globin chains (gamma chains/[gamma chains+beta chain]) as measured by UPLC analysis of the cell lysates from the erythroid progeny of mPB CD34+ cells after electroporation with the indicated doses (2, 4, or 8 μM) of OLI8394-RNP and indicated doses (0, 1.25, 2.5, or 5 μM) of ssODN OLI16424 (“−4 nt-strand”).

[0094] FIGS. 23A-B depict a schematic of and results provided by ssODN templates with symmetrical and asymmetrical homology arms. FIG. 23A depicts the CCAAT box target sites at HBG1 and HBG2 that is targeted by OLI8394 (SEQ ID NO:971) and OLI7066 (SEQ ID NO:970). ssODNs with symmetrical or asymmetrical arms were designed to provide a template that copies the -4nt deletion (HBG-112:-115) of HBG1 and HBG2 (Table 11). The ssODN “encodes” the respective deletion with sequence homology arms flanking the absent sequence to create a perfect deletion at HBG-112:-115. FIG. 23B depicts the percentage of indels detected by sequencing the HBG PCR product 72 hours after electroporation of mPB CD34+ cells with 2 μM of OLI8394-RNP and 2.5 μM of various ssODNs, OLI16424 (“90/90”), OLI16419 (“40/80”) or OLI16421 (“50/50”), that “encode” the 4 nt deletion (HBG-112:-115) (Table 11).

[0095] FIG. 24 depicts the percentage of indels detected by sequencing the HBG PCR product 72 hours after electroporation of mPB CD34+ cells with D10ACas9 complexed with Sp37 and SpA gRNAs (Table 12) (“sp37-D10A-RNP+spA-D10A-RNP”) alone or with ssODN OLI16424 (“−4 nt-strand”) (Table 11). The percentage of the precise-4 nt deletion (i.e., Δ-112:-115) is distinguished from other indels.

[0096] FIG. 25 depicts gene editing of HBG of mPB CD34+ cells electroporated with variants of Acidaminococcus sp. Cpf1 (“AsCpf1”), namely His-AsCpf1-nNLS (SEQ ID NO:1000) and His-AsCpf1-SNLS-SNLS (SEQ ID NO:1001) complexed with the guide RNA HBG1-1 (OLI13620) (Table 13) (“His-AsCpf1-nNLS_HBG1-1 RNP” and “His-AsCpf1-sNLS-sNLS_HBG1-1 RNP”). The RNP were electroporated at 5 μM or 20 μM.

[0097] FIGS. 26A-C depict gene editing of HBG of mPB CD34+ cells electroporated with His-AsCpf1-SNLS-sNLS_HBG1-1 RNP alone or with various ssODNs. FIG. 26A depicts the percentage of indels detected by sequencing the HBG PCR product 72 hours after electroporation with His-AsCpf1-sNLS-sNLS_HBG1-1 RNP alone or with OLI164324 (“−4nt-strand”), OLI16430 (“−4 nt+strand”), OLI16410 (“−18 nt-strand”), or OLI16409 (“−18 nt+strand”). FIG. 26B depicts the percentage of the precise 18 nucleotide deletion indels detected by sequencing the HBG PCR product 72 hours after electroporation with His-AsCpf1-sNLS-sNLS_HBG1-1 RNP alone or with OLI16410 (“−18 nt-strand”) or OLI16409 (“−18 nt+strand”). FIG. 26C depicts the percentage of the precise 18 nt deletion within all indels detected by sequencing the HBG PCR product 72 hours after electroporation with His-AsCpf1-sNLS-sNLS_HBG1-1 RNP alone or with OLI16410 (“−18 nt-strand”) or OLI16409 (“−18 nt+strand”).

[0098] FIGS. 27A-F depict schematics of the HBG1-1 target region (SEQ ID NOS: 1269 and 1270) and S. Pyogenes Cas9 gRNA pairs used in combination. FIG. 27A shows the target region of HBG1-1 gRNA (comprising the RNA targeting domain set forth in SEQ ID NO:1002, Table 15). The distal CCAAT box of HBG promoter (i.e., HBG1/2 c.-111 to -115) is indicated by a grey box. FIG. 27B shows the target region of HBG1-1, the distal CCAAT box of HBG, and the target region SpA gRNA (comprising the targeting domain of SEQ ID NO:941, Table 15). FIG. 27C shows the target region of HBG1-1, the distal CCAAT box of HBG, and the target region SpG gRNA (comprising the targeting domain of SEQ ID NO: 359, Table 15). FIG. 27D shows the target region of HBG1-1, the distal CCAAT box of HBG, the target region of tSpA dead gRNA (“dgRNA”) (comprising the targeting domain of SEQ ID NO:326, Table 15), and the target region of Sp182 dgRNA (comprising the targeting domain of SEQ ID NO:1028, Table 15). FIG. 27E shows the target region of HBG1-1, the distal CCAAT box of HBG, and tSpA dgRNA (comprising the targeting domain of SEQ ID NO:326, Table 15). FIG. 27F shows the target region of HBG1-1, the distal CCAAT box of HBG, and the target region of Sp182 dgRNA (comprising the targeting domain of SEQ ID NO:1028, Table 15).

[0099] FIGS. 28A-B depict HbF expression achieved by ex vivo editing of mPB CD34+ cells using HBG1-1-AsCpf1-RNP targeting the HBG promotor region. FIG. 28A shows results of editing at the HBG promoter region following delivery of 5 μM or 20 μM HBG1-1-AsCpf1-RNP (“HBG-1-1”) via Amaxa electroporation in mPB CD34+ cells. Delivery of 20 μM HBG1-1-AsCpf1-RNP via Amaxa electroporation results in up to ˜43% editing, and 21% HbF induction (above background levels). HbF levels are represented by black circles depicting expression levels of gamma-globin chains over total beta-like globin chains (gamma chains/[gamma chains+beta chain]) as measured by UPLC analysis on the erythroid progeny of mPB CD34+ cells. Grey bars depict the percentage of indels 72 hours post-electroporation detected by next generation sequencing (NGS) of the HBG PCR product. FIG. 28B shows results of editing at the HBG promoter region following delivery of 5 μM or 20 μM HBG1-1-AsCpf1-RNP (“HBG-1-1”) via MaxCyte electroporation in mPB CD34+ cells. Delivery of 20 μM HBG1-1-AsCpf1-RNP via MaxCyte electroporation results in up to ˜16% editing, and 7% HbF induction (above background levels). HbF levels are represented by black circles depicting expression levels of gamma-globin chains over total beta-like globin chains (gamma chains/[gamma chains+beta chain]) as measured by UPLC analysis on the erythroid progeny of mPB CD34+ cells. Grey bars depict the percentage of indels 72 hours post-electroporation detected by NGS of the HBG PCR product.

[0100] FIG. 29 depicts enhanced editing by HBG1-1-AsCpf1H800A-RNP at the HBG promotor region on the Maxcyte device by co-delivering various S. Pyogenes Cas9 WT or Cas9D10A RNPs. “S.Py D10A” represents the Cas9 D10A nickase protein and “S.Py WT” represents the Cas9 WT protein. RNPs tested include SpA-D10A-RNP, SpG-D10A-RNP, tSpA-Cas9-RNP, Sp182-Cas9-RNP, and tSpA-Cas9-RNP+Sp182-Cas9-RNP (Table 14). Total editing at the HBG promoter region (grey bars) and the associated HbF protein induction (black circles) following delivery of HBG1-1-AsCpf1H800A-RNP alone (“HBG1-1”), or in combination with S. Pyogenes Cas9 RNPs or pairs of RNP, is depicted. HbF levels are represented by black circles depicting expression levels of gamma-globin chains over total beta-like globin chains (gamma chains/[gamma chains+beta chain]) as measured by UPLC analysis on the erythroid progeny of mPB CD34+ cells. Grey bars depict the percentage of indels detected by NGS of the HBG PCR product.

[0101] FIG. 30 depicts viability of mPB CD34+ cells following MaxCyte delivery of HBG1-1-AsCpf1H800A-RNP alone (“HBG1-1”) or in combination with various S. Pyogenes Cas9 WT or Cas9D10A RNPs. “S.Py D10A” represents the Cas9 D10A nickase protein and “S.Py WT” represents the Cas9 WT protein. RNPs tested include SpA-D10A-RNP, SpG-D10A-RNP, tSpA-Cas9-RNP, Sp182-Cas9-RNP, and tSpA-Cas9-RNP+Sp182-Cas9-RNP (Table 14). Viability was measured by DAPI staining and flow cytometry analysis at 24h post electroporation.

[0102] FIGS. 31A-B depict the cleavage sites of HBG1-1-AsCpf1H800A-RNP and D10A-Cas9 RNP at the target region and the editing profile resulting from the co-delivery of the HBG1-1-AsCpf1H800A-RNP with a D10A RNP. FIG. 31A depicts the position of the HBG1-1-AsCpf1H800A-RNP cut sites on each strand of the target region (light grey arrows), as well as position of the nicking site targeted by the SpG-D10A-RNP and SpA-D10A-RNP (dark arrows) (Table 14). FIG. 31B depicts the editing profile resulting from the co-delivery of the HBG1-1-AsCpf1H800A-RNP (“HBG1-1 RNP”) with either SpG-D10A-RNP (“spG RNP”) or SpA-D10A-RNP (“spA RNP”) in mPB CD34+ at 72 h post-electroporation as detected by NGS analysis of the HBG PCR product (Table 14). The X-axis represents genomic position of the center of the indel relative to the HBG1-1-AsCpf1H800A-RNP positive strand cleavage site. The Y axis represents the length of the indel, where deletions are represented as negative values and insertions are represented as positive values. The total frequency of each indel is represented by the area of the symbol. Indels occurring at frequency equal or above 0.1% are depicted. The SpG and SpA target sites are indicated by dotted lines.

[0103] FIGS. 32A-B depict that the co-delivery of Sp182-Cas9-RNP with HBG1-1-AsCpf1H800A-RNP results in a boost in total indels and in distal CCAAT box disrupting indels with no substantial alteration of the indel profile, as detected by NGS analysis of the HBG PCR product at 72 h post-electroporation. FIG. 32A shows the indel profiles following editing with HBG1-1-AsCpf1H800A-RNP (“HBG1-1 RNP”) alone, or in combination with Sp182-Cas9-RNP (“sp182 RNP”). The X-axis represents genomic position of the center of the indel relative to the HBG1-1-AsCpf1H800A-RNP positive strand cleavage site. The Y axis represents the length of the indel, where deletions are represented as negative values and insertions are represented as positive values. The total frequency of each indel is represented by the area of the symbol. Indels occurring at frequency equal or above 0.1% are depicted. The Sp182 target site is indicated by a dotted line. FIG. 32B depicts the frequency of indels disrupting either none, 1nt, 2nt, 3nt, 4nt, or the entire 5nt of the distal CCAAT box sequence.

[0104] FIG. 33 depicts that optimal doses of HBG1-1-AsCpf1H800A-RNP co-delivered with Sp182-Cas9-RNP result in an increase in total editing, and HbF production (Table 14). Delivery of HBG1-1-AsCpf1H800A-RNP (“HBG1-1”) as an RNP pair alongside Sp182-Cas9-RNP (“Sp182”), achieved >92% editing (grey bars) at the HBG promoter region with up to 34% HbF induction (above background) (black circles). No editing was observed when Sp182-Cas9-RNP was delivered alone at 12 μM. HbF levels are represented by black circles depicting expression levels of gamma-globin chains over total beta-like globin chains (gamma chains/[gamma chains+beta chain]) as measured by UPLC analysis on the erythroid progeny of mPB CD34+ cells. Grey bars depict the percentage of indels detected by NGS of the HBG PCR product.

[0105] FIG. 34 depicts the distribution of levels of gamma chain expression over total beta-like chains (gamma chains/[gamma chains+beta chain]) as measured by UPLC in the clonal erythroid progeny of single human mPB CD34+ cells edited at the HBG promotor region with HBG1-1-AsCpf1H800A-RNP in combination with Sp182-Cas9-RNP (Table 14). Each black circle represents the gamma-globin protein level detected in a clonal erythroid population derived from a single cell, isolated by FACS sorting at 48h post electroporation.

[0106] FIGS. 35A-C depicts total editing, HbF production, viability, and colony forming potential after co-delivery of RNP containing modified HBG1-1 gRNA (SEQ ID NO:1041, Table 14) complexed to His-AsCpf1-sNLS-sNLS H800A (SEQ ID NO:1032, Table 14) (“His-AsCpf1-SNLS-SNLS H800A_HBG1-1 RNP,” represented as “HBG1-1” in FIGS. 35A-C) with increasing concentrations of SSODN OLI16431 (SEQ ID NO:1040, Table 11) (represented as “OLI16431” in FIGS. 35A-C) (Table 11). FIG. 35A depicts editing at the distal CAATT box (grey bars) and HbF induction (black circles) after co-delivery of 6 μM His-AsCpf1-sNLS-sNLS H800A_HBG1-1 RNP and increasing concentrations of SSODN OLI16431. HbF levels are represented by black circles depicting expression levels of gamma-globin chains over total beta-like globin chains (gamma chains/[gamma chains+beta chain]) as measured by UPLC analysis on the erythroid progeny of mPB CD34+ cells. Grey bars depict the percentage of indels detected by NGS of the HBG PCR product. FIG. 35B depicts viability of mPB CD34+ cells following delivery of His-AsCpf1-sNLS-sNLS H800A_HBG1-1 RNP alone or in combination with increasing doses of ssODN OLI16431. Viability was measured by DAPI exclusion at 72 hours post electroporation. FIG. 35C depicts the hematopoietic activity of the “HBG1-1” RNP and ssODN OLI16431 treated and donor matched untreated control CD34+ cells in colony forming cell (CFC) assays. CFCs shown are per 800 CD34+ cells plated. The number and subtype of colonies are indicated (GEMM: granulocyte-erythroid-monocyte-macrophage colony (black), GM: granulocyte-macrophage colony (dark grey), E: erythroid colony (light grey)).

[0107] FIGS. 36A-B depicts total editing, HbF production, and viability results using different concentrations of RNP containing unmodified HBG1-1 gRNA (SEQ ID NO:1022, Table 14) complexed to His-AsCpf1-sNLS-sNLS H800A (SEQ ID NO:1032, Table 14) (“His-AsCpf1-sNLS-sNLS H800A_HBG1-1 RNP,” represented as “HBG1-1” in FIGS. 36A-B) co-delivered with different concentrations of ssODN OLI16431 (SEQ ID NO:1040, Table 11) (represented as “OLI16431” in FIGS. 36A-B) (Table 11). FIG. 36A depicts editing at the distal CAATT box (black bars (48 hours) and light grey bars (14 days of erythroid culture)) and HbF induction (black circles) after co-delivery of His-AsCpf1-sNLS-sNLS H800A_HBG1-1 RNP (“HBG1-1”) and ssODN OLI16431 at varying concentrations. HbF levels are represented by black circles depicting expression levels of gamma-globin chains over total beta-like globin chains (gamma chains/[gamma chains+beta chain]) as measured by UPLC analysis on the erythroid progeny of mPB CD34+ cells. Bars depict the percentage of indels detected by NGS of the HBG PCR product at 48 hours (black) and 14 day erythroid culture (light grey) timepoints. FIG. 36B depicts viability of mPB CD34+ cells following delivery of His-AsCpf1-sNLS-SNLS H800A_HBG1-1 RNP alone (“HBG1-1”), ssODN OLI16431 alone, or in combination with varying doses of HBG1-1 and OLI16431. Viability was measured by DAPI exclusion at 48 hours post electroporation and after 14 days in erythroid culture. Following the editing of mPB CD34+ cells, ex vivo differentiation into the erythroid linage was performed for 18 days (Giarratana 2011). At day 14 of culture, a subset of cells were isolated and viability (DAPI exclusion) and editing (NGS of the HBG PCR product) measurements were taken.

[0108] FIG. 37 depicts editing by RNP in mPB CD34+ cells. RNPs included gRNA complexed with Cpf1 protein as set forth in Table 21. Illumina sequencing was performed on isolated genomic DNA at 72 hours post electroporation.

[0109] FIGS. 38A-B depict editing in bulk CD34+ cell population (black bars), progenitor cells (light grey bars), and HSCs (dark grey bars), as determined by Illumina sequencing 48 hours post electroporation. FIG. 38A depicts RNP33 (Table 21) delivered alone or co-delivered with ssODN OLI16431 (SEQ ID NO:1040, Table 11). FIG. 38B depicts RNP33 (Table 21) delivered alone or co-delivered with Sp182 RNP (dead gRNA comprising SEQ ID NO:1027 (Table 14) complexed with S. pyogenes Cas9 (SEQ ID NO:1033)).

[0110] FIG. 39 depicts editing in bulk CD34+ cell population (black bars), progenitor cells (light grey bars), and HSCs (dark grey bars), as determined by Illumina sequencing 48 hours post electroporation. RNP34, RNP33, and RNP43 (Table 21) were delivered alone or in combination with Sp182 RNP (dead gRNA comprising SEQ ID NO:1027 (Table 14) complexed with S. pyogenes Cas9 (SEQ ID NO:1033)) or ssODN OLI16431 (SEQ ID NO:1040, Table 11).

[0111] FIG. 40 depicts editing in CD34+ cells as determined by Illumina sequencing 72 hours post electroporation. RNP64, RNP63, and RNP45 (Table 21) were delivered at a stoichiometry (gRNA: Cpf1 complexation ratio) of either 2, or 4, where the gRNA is in a molar excess.

[0112] FIG. 41 depicts editing in CD34+ cells as determined by Illumina sequencing 72 hours post electroporation. RNP33, RNP64, RNP63, and RNP45 (Table 21) were delivered alone or in combination with Sp182 RNP (dead gRNA comprising SEQ ID NO:1027 (Table 14) complexed with S. pyogenes Cas9 (SEQ ID NO:1033)) or ssODN OLI16431 (SEQ ID NO:1040, Table 11).

[0113] FIG. 42 depicts editing in CD34+ cells as determined by Illumina sequencing. RNPs comprising Cpf1 (SEQ ID: 1094) complexed to gRNAs with various 5′ DNA extensions (Table 21), were delivered alone or in combination with 8 μM OLI16431 (SEQ ID NO:1040, Table 11).

[0114] FIG. 43 depicts editing in CD34+ cells, as determined by Illumina sequencing. RNPs comprising gRNAs with matched 5′ ends (RNP49 vs RNP58 and RNP59 vs RNP60, Table 21) were delivered to CD34+ cells to assess the impact of 3′ modifications. In both comparisons, gRNAs with 3′ PS—OMe outperformed the unmodified 3′ version at 24 hours post electroporation.

[0115] FIGS. 44A-B depict editing in CD34+ cells as determined by Illumina sequencing 24 and 48 hours post electroporation. RNP58 (Table 21) was delivered to CD34+ cells at a stoichiometry (gRNA: Cpf1 complexation ratio) of either 2:1, 1:1 or 0.5:1 molar ratios. At all doses tested, editing was best when RNP was complexed at 2:1 ratio.

[0116] FIGS. 45A-B depict editing in CD34+ cells as determined by Illumina sequencing. FIGS. 45A and 45B depict RNPs comprising gRNAs with matched 5′ ends, but different 3′ modifications (Table 21) delivered to CD34+ cells to assess the impact of 3′ modifications or extensions.

[0117] FIGS. 46A-C depict editing in CD34+ cells and their erythroid progeny, and HbF levels in the erythroid progeny following delivery of RNPs targeting various cut sites within the HBG locus. FIG. 46A depicts RNPs comprising guide RNAs containing an unmodified 5′ and 1× PS-Ome at the 3′ end (Table 21). FIG. 46B depicts RNPs comprising guide RNAs containing 2PS+20 DNA extension at the 5′ and 1×PS-Ome at the 3′ end (Table 21). FIG. 46C depicts RNPs comprising guide RNAs containing a 25 DNA extension at the 5′ and 1× PS-Ome at the 3′ end (Table 21).

[0118] FIG. 47 depicts editing and HbF levels in erythroid progeny of CD34+ cells following delivery of RNP58 at 1 μM, 2 μM, and 4 μM.

[0119] FIG. 48 depicts editing in CD34+ cells following Maxcyte electroporation of RNPs. RNP58, RNP26, RNP27, and RNP28 comprising gRNA SEQ ID: 1051 complexed to different Cpf1 proteins (SEQ IDs: 1094, 1096, 1107, 1108) (Table 21) were delivered into CD34+ cells. Editing was determined by Illumina-sequencing 24 and 48 hours post electroporation.

[0120] FIG. 49 depicts editing in CD34+ cells following Maxcyte electroporation of RNPs. RNP58, RNP29, RNP30, and RNP31 comprising Cpf1 protein SEQ ID: 1094 complexed to guide RNAs with various 5′ extensions (Table 21) were delivered into CD34+ cells. Editing was determined by Illumina-seq 24 and 48 hours post electroporation. RNP30 was not tested (nt) at 1 μM due to limiting cell numbers.

[0121] FIG. 50 depicts editing in bulk CD34+ cell population (black bars), progenitor cells (dark grey bars), and HSCs (light grey bars), as determined by Illumina sequencing 48 hours post electroporation. RNP58, RNP27, and RNP26 (Table 21) were delivered to CD34+ cells at 2 μM or 4 μM.

[0122] FIG. 51 depicts editing in bulk CD34+ cell population (black bars), progenitor cells (dark grey bars), and HSCs (light grey bars), as determined by Illumina sequencing 48 hours post electroporation. RNP61, RNP62, and RNP34 (Table 21) (8 μM) were co-delivered to CD34+ cells with ssODN OLI16431 (SEQ ID NO:1040, Table 11) (8 UM).

[0123] FIG. 52 depicts editing in bulk CD34+ cell population (black bars), progenitor cells (dark grey bars), and HSCs (light grey bars), as determined by Illumina sequencing 48 hours post electroporation. RNP58 and RNP32 (Table 21) were delivered to CD34+ cells at 2 μM.

[0124] FIG. 53 depicts editing in bulk CD34+ cell population (black bars), progenitor cells (dark grey bars), and HSCs (light grey bars), as determined by Illumina sequencing 48 hours post electroporation. RNP58 and RNP1 (Table 21) were delivered to CD34+ cells at 2 μM, 4 μM, or 8 μM. The cells edited with RNP1 at 2 μM were not sorted (N.S), and thus editing data is not available.

[0125] FIG. 54 depicts the indels of engrafted mPB CD34+ cells from BM of “NBSGW” mice 8 weeks post infusion of electroporated cells. RNP34 and RNP33 (Table 21) (8 M) were co-delivered to CD34+ cells with ssODN OLI16431 (SEQ ID NO:1040, Table 11) (6 μM).

[0126] FIGS. 55A-B depict the indels of engrafted mPB CD34+ cells and HbF expression by erythroid cells derived from chimeric BM of “NBSGW” mice 8 weeks post infusion of electroporated cells. RNP33 or RNP34 (Table 21) was co-delivered with Sp182 RNP (dead gRNA comprising SEQ ID NO: 1027 (Table 14) complexed with S. pyogenes Cas9 (SEQ ID NO:1033)) (16 μM total RNP) to CD34+ cells. FIG. 55A depicts the indel frequency in unfractionated bone marrow or flow-sorted individual populations of CD15+, CD19+, GlyA+, and Lin-CD34+ cells in mock-transfected (no RNP added) or RNP transfected cells. Lin-CD34+ cells are defined as CD34+ cells that are negative for CD3, CD14, CD15, CD16, CD19, CD20, and CD56) from bone marrow (BM) of nonirradiated NOD,B6.SCID I12rγ−/−Kit (W41/W41) (“NBSGW”) mice infused with mock (no RNP) or RNP transfected mPB CD34+ cells. Indels were determined for each cell population by Illumina sequencing. FIG. 55B depicts the HbF expression, calculated by UPLC as gamma/beta-like (%) from erythroid cell lysates following an 18-day erythroid differentiation culture from total chimeric BM.

[0127] FIGS. 56A-B depict the indels of engrafted mPB CD34+ cells and HbF expression by erythroid cells derived from chimeric BM of “NBSGW” mice 8 weeks post infusion of electroporated cells. RNP61 or RNP62 (Table 21) (8 μM) was co-delivered with ssODN OLI16431 (SEQ ID NO:1040, Table 11) (8 μM) to CD34+ cells. FIG. 56A depicts the indels of unfractionated bone marrow or flow-sorted individual populations of CD15+, CD19+, GlyA+, and Lin-CD34+ cells in mock-transfected (no RNP added) or RNP transfected cells. Lin-CD34+ cells are defined as CD34+ cells that are negative for CD3, CD14, CD15, CD16, CD19, CD20, and CD56) from bone marrow (BM) of nonirradiated NBSGW mice infused with mock (no RNP) or RNP transfected mPB CD34+ cells. Indels were determined for each cell population by Illumina sequencing. FIG. 56B depicts the HbF expression, calculated by UPLC as gamma/beta-like (%) by erythroid cells following an 18-day erythroid differentiation culture from total chimeric BM.

[0128] FIG. 57 depicts human chimerism within bone marrow 8 weeks post infusion with mock (no RNP added) mPB CD34+ cells, or mPB CD34+ cells edited with RNP1 (4 or 8 μM) or RNP58 (2, 4 or 8 μM) (table 21). Human chimerism and lineage reconstitution (CD45+, CD14+, CD19+, glycophorin A (GlyA, CD235a+), lineage, and CD34+, and mouse CD45+marker expression) in BM was determined by flow cytometry.

[0129] FIG. 58 depicts indels within unsorted bulk bone marrow 8 weeks post infusion with mock (no RNP added) mPB CD34+ cells, or mPB CD34+ cells edited with RNP1 (4 or 8 μM) or RNP58 (2, 4 or 8 μM) (table 21). Indels were determined by Illumina sequencing.

[0130] FIG. 59 depicts the indel frequency in unfractionated bone marrow or flow-sorted individual populations of CD15+, CD19+, GlyA+, and Lin-CD34+ cells in mock-transfected (no RNP added) or RNP transfected cells. Lin-CD34+ cells are defined as CD34+ cells that are negative for CD3, CD14, CD15, CD16, CD19, CD20, and CD56 from bone marrow (BM) of nonirradiated NOD,B6.SCID II2rγ−/− Kit (W41/W41) (“NBSGW”) mice infused with mock (no RNP) or RNP transfected mPB CD34+ cells. Indels were determined for each cell population by Illumina sequencing.

[0131] FIG. 60 depicts HbF from GlyA+ fraction isolated from bone marrow at 8 weeks post infusion with mock (no RNP added) mPB CD34+ cells, or mPB CD34+ cells edited with RNP58 (2, 4 or 8 μM) (table 21).

[0132] FIG. 61 depicts colony forming potential of cells from bone marrow flushes taken 8 weeks post infusion of mock or edited human mobilized CD34+ cells. The number and subtype of colonies are indicated (GEMM: granulocyte-erythroid-monocyte-macrophage colony (black), GM: granulocyte-macrophage colony (dark grey), E: erythroid colony (light grey)).

[0133] FIG. 62 depicts the sequences of Cpf1 protein variants set forth in Table 20. Nuclear localization sequences are shown as bolded letters, six-histidine sequences are shown as underlined letters. Additional permutations of the identity and N-terminal/C-terminal positions of NLS sequences, e.g., appending two or more nNLS sequences or combinations of nNLS and sNLS sequences (or other NLS sequences) to either the N-terminal/C-terminal positions, as well as sequences with and without purification sequences, e.g., six-histidine sequences, are within the scope of the instantly disclosed subject matter.

### DETAILED DESCRIPTION

### Definitions and Abbreviations

[0134] Unless otherwise specified, each of the following terms has the meaning associated with it in this section.

[0135] The indefinite articles “a” and “an” refer to at least one of the associated noun, and are used interchangeably with the terms “at least one” and “one or more.” For example, “a module” means at least one module, or one or more modules.

[0136] The conjunctions “or” and “and/or” are used interchangeably as non-exclusive disjunctions.

[0137] “Domain” is used to describe a segment of a protein or nucleic acid. Unless otherwise indicated, a domain is not required to have any specific functional property.

[0138] The term “exogenous trans-acting factor” refers to any peptide or nucleotide component of a genome editing system that both (a) interacts with an RNA-guided nuclease or gRNA by means of a modification, such as a peptide or nucleotide insertion or fusion, to the RNA-guided nuclease or gRNA, and (b) interacts with a target DNA to alter a helical structure thereof. Peptide or nucleotide insertions or fusions may include, without limitation, direct covalent linkages between the RNA-guided nuclease or gRNA and the exogenous trans-acting factor, and/or non-covalent linkages mediated by the insertion or fusion of RNA/protein interaction domains such as MS2 loops and protein/protein interaction domains such as a PDZ, Lim or SH1, 2 or 3 domains. Other specific RNA and amino acid interaction motifs will be familiar to those of skill in the art. Trans-acting factors may include, generally, transcriptional activators.

[0139] The term “booster element” refers to an element which, when co-delivered with a ribonucleoprotein (RNP) complex comprising a gRNA complexed to an RNA-guided nuclease (“gRNA-nuclease-RNP”), increases editing of a target nucleic acid compared with editing of the target nucleic acid without the booster element. In certain embodiments, co-delivery may be sequential or simultaneous. In certain embodiments, a booster element may be an RNP complex comprised of a dead guide RNA complexed with a WT Cas9 protein, a Cas9 nickase protein (e.g., Cas9 D10A protein), or an enzymatically inactive Cas9 (eiCas9) protein. In certain embodiments, a booster element may be an RNP complex comprised of a guide RNA complexed with a Cas9 nickase protein (e.g., Cas9 D10A protein) or an enzymatically inactive Cas9 (eiCas9) protein. In certain embodiments, a booster element may be a single- or double stranded donor template DNA. In certain embodiments, one or more booster elements may be codelivered with a gRNA-nuclease-RNP to increase editing of a target nucleic acid. In certain embodiments, a booster element may be co-delivered with an RNP comprising a gRNA complexed to a Cpf1 molecule (“gRNA-Cpf1-RNP”) to increase editing of a target nucleic acid.

[0140] “Productive indel” refers to an indel (deletion and/or insertion) that results in HbF expression. In certain embodiments, a productive indel may induce HbF expression. In certain embodiments, a productive indel may result in an increased level of HbF expression.

[0141] An “indel” is an insertion and/or deletion in a nucleic acid sequence. An indel may be the product of the repair of a DNA double strand break, such as a double strand break formed by a genome editing system of the present disclosure. An indel is most commonly formed when a break is repaired by an “error prone” repair pathway such as the NHEJ pathway described below.

[0142] “Gene conversion” refers to the alteration of a DNA sequence by incorporation of an endogenous homologous sequence (e.g. a homologous sequence within a gene array). “Gene correction” refers to the alteration of a DNA sequence by incorporation of an exogenous homologous sequence, such as an exogenous single- or double stranded donor template DNA. Gene conversion and gene correction are products of the repair of DNA double-strand breaks by HDR pathways such as those described below.

[0143] Indels, gene conversion, gene correction, and other genome editing outcomes are typically assessed by sequencing (most commonly by “next-gen” or “sequencing-by-synthesis” methods, though Sanger sequencing may still be used) and are quantified by the relative frequency of numerical changes (e.g., ±1, ±2 or more bases) at a site of interest among all sequencing reads. DNA samples for sequencing may be prepared by a variety of methods known in the art, and may involve the amplification of sites of interest by polymerase chain reaction (PCR), the capture of DNA ends generated by double strand breaks, as in the GUIDEseq process described in Tsai 2016 (incorporated by reference herein) or by other means well known in the art. Genome editing outcomes may also be assessed by in situ hybridization methods such as the FiberComb™ system commercialized by Genomic Vision (Bagneux, France), and by any other suitable methods known in the art.

[0144] “Alt-HDR,” “alternative homology-directed repair,” or “alternative HDR” are used interchangeably to refer to the process of repairing DNA damage using a homologous nucleic acid (e.g., an endogenous homologous sequence, e.g., a sister chromatid, or an exogenous nucleic acid, e.g., a template nucleic acid). Alt-HDR is distinct from canonical HDR in that the process utilizes different pathways from canonical HDR, and can be inhibited by the canonical HDR mediators, RAD51 and BRCA2. Alt-HDR is also distinguished by the involvement of a single-stranded or nicked homologous nucleic acid template, whereas canonical HDR generally involves a double-stranded homologous template.

[0145] “Canonical HDR,” “canonical homology-directed repair” or “cHDR” refer to the process of repairing DNA damage using a homologous nucleic acid (e.g., an endogenous homologous sequence, e.g., a sister chromatid, or an exogenous nucleic acid, e.g., a template nucleic acid). Canonical HDR typically acts when there has been significant resection at the double strand break, forming at least one single stranded portion of DNA. In a normal cell, cHDR typically involves a series of steps such as recognition of the break, stabilization of the break, resection, stabilization of single stranded DNA, formation of a DNA crossover intermediate, resolution of the crossover intermediate, and ligation. The process requires RAD51 and BRCA2, and the homologous nucleic acid is typically double-stranded.

[0146] Unless indicated otherwise, the term “HDR” as used herein encompasses both canonical HDR and alt-HDR.

[0147] “Non-homologous end joining” or “NHEJ” refers to ligation mediated repair and/or non-template mediated repair including canonical NHEJ (cNHEJ) and alternative NHEJ (altNHEJ), which in turn includes microhomology-mediated end joining (MMEJ), single-strand annealing (SSA), and synthesis-dependent microhomology-mediated end joining (SD-MMEJ).

[0148] “Replacement” or “replaced,” when used with reference to a modification of a molecule (e.g. a nucleic acid or protein), does not require a process limitation but merely indicates that the replacement entity is present.

[0149] “Subject” means a human, mouse, or non-human primate. A human subject can be any age (e.g., an infant, child, young adult, or adult), and may suffer from a disease, or may be in need of alteration of a gene.

[0150] “Treat,” “treating,” and “treatment” mean the treatment of a disease in a subject (e.g., a human subject), including one or more of inhibiting the disease, i.e., arresting or preventing its development or progression; relieving the disease, i.e., causing regression of the disease state; relieving one or more symptoms of the disease; and curing the disease.

[0151] “Prevent,” “preventing,” and “prevention” refer to the prevention of a disease in a subject, including (a) avoiding or precluding the disease; (b) affecting the predisposition toward the disease; or (c) preventing or delaying the onset of at least one symptom of the disease.

[0152] A “kit” refers to any collection of two or more components that together constitute a functional unit that can be employed for a specific purpose. By way of illustration (and not limitation), one kit according to this disclosure can include a guide RNA complexed or able to complex with an RNA-guided nuclease, and accompanied by (e.g. suspended in, or suspendable in) a pharmaceutically acceptable carrier. In certain embodiments, the kit may include a booster element. The kit can be used to introduce the complex into, for example, a cell or a subject, for the purpose of causing a desired genomic alteration in such cell or subject. The components of a kit can be packaged together, or they may be separately packaged. Kits according to this disclosure also optionally include directions for use (DFU) that describe the use of the kit e.g., according to a method of this disclosure. The DFU can be physically packaged with the kit, or it can be made available to a user of the kit, for instance by electronic means.

[0153] The terms “polynucleotide”, “nucleotide sequence”, “nucleic acid”, “nucleic acid molecule”, “nucleic acid sequence”, and “oligonucleotide” refer to a series of nucleotide bases (also called “nucleotides”) in DNA and RNA, and mean any chain of two or more nucleotides. The polynucleotides, nucleotide sequences, nucleic acids etc. can be chimeric mixtures or derivatives or modified versions thereof, single-stranded or double-stranded. They can be modified at the base moiety, sugar moiety, or phosphate backbone, for example, to improve stability of the molecule, its hybridization parameters, etc. A nucleotide sequence typically carries genetic information, including, but not limited to, the information used by cellular machinery to make proteins and enzymes. These terms include double-or single-stranded genomic DNA, RNA, any synthetic and genetically manipulated polynucleotide, and both sense and antisense polynucleotides. These terms also include nucleic acids containing modified bases.

[0154] Conventional IUPAC notation is used in nucleotide sequences presented herein, as shown in Table 1, below (see also Cornish-Bowden A, Nucleic Acids Res. 1985 May 10; 13 (9): 3021-30, incorporated by reference herein). It should be noted, however, that “T” denotes “Thymine or Uracil” in those instances where a sequence may be encoded by either DNA or RNA, for example in gRNA targeting domains.

TABLE 1
IUPAC nucleic acid notation

| Character | Base |
|---|---|
| A | Adenine |
| T | Thymine or Uracil |
| G | Guanine |
| C | Cytosine |
| U | Uracil |
| K | Gor T/U |
| M | A or C |
| R | A or G |
| Y | C or T/U |
| S | C or G |
| W | A or T/U |
| B | C, G or T/U |
| V | A, C or G |
| H | A, C or T/U |
| D | A, Gor T/U |
| N | A, C, G or T/U |

[0155] The terms “protein,” “peptide” and “polypeptide” are used interchangeably to refer to a sequential chain of amino acids linked together via peptide bonds. The terms include individual proteins, groups or complexes of proteins that associate together, as well as fragments or portions, variants, derivatives and analogs of such proteins. Peptide sequences are presented herein using conventional notation, beginning with the amino or N-terminus on the left, and proceeding to the carboxyl or C-terminus on the right. Standard one-letter or three-letter abbreviations can be used.

[0156] The notation “CCAAT box target region” and the like refer to a sequence that is 5′ of the transcription start site (TSS) of the HBG1 and/or HBG2 gene. CCAAT boxes are highly conserved motifs within the promoter region of a-like and β-like globin genes. The regions within or near the CCAAT box play important roles in globin gene regulation. For example, the γ-globin distal CCAAT box is associated with hereditary persistence of fetal hemoglobin. A number of transcription factors have been reported to bind to the duplicated CCAAT box region of the γ-globin promoter, e.g., NF-Y, COUP-TFII (NF-E3), CDP, GATA1/NF-E1 and DRED (Martyn 2017). While not wishing to be bound by theory, it is believed that the binding sites of the transcriptional activator NF-Y overlaps with transcriptional repressors at the γ-globin promoter. HPFH mutations present within the distal γ-globin promoter region, e.g., within or near the CCAAT box, may alter the competitive binding of those factors and thus contribute to the increased γ-globin expression and elevated levels of HbF. Genomic locations provided herein for HBG1 and HBG2 are based on the coordinates provided in NCBI Reference Sequence NC_000011, “Homo sapiens chromosome 11, GRCh38.p12 Primary Assembly,” (Version NC_000011.10). The distal CCAAT box of HBG1 and HBG2 is positioned at HBG1 and HBG2 c.-111 to -115 (Genomic location is Hg38 Chr11: 5,249,968 to Chr11: 5,249,972 and Hg38 Chr11: 5,254,892 to Chr11: 5,254,896, respectively). The HBG1 c.-111 to -115 region is exemplified in SEQ ID NO:902 (HBG1) at positions 2823-2827, and the HBG2 c.-111 to -115 region is exemplified in SEQ ID NO:903 (HBG2) at positions 2747-2751. In certain embodiments, the “CCAAT box target region” denotes the region that is at or near the distal CCAAT box and includes the nucleotides of the distal CCAAT box and 25 nucleotides upstream (5′) and 25 nucleotides downstream (3′) of the distal CCAAT box (i.e., HBG1/2 c.-86 to -140) (Genomic location is Hg38 Chr11: 5249943 to Hg38 Chr11: 5249997 and Hg38 Chr11: 5254867 to Hg38 Chr11: 5254921, respectively). The HBG1 c.-86 to -140 region is exemplified in SEQ ID NO:902 (HBG1) at positions 2798-2852, and the HBG2 c.-86 to -140 region is exemplified in SEQ ID NO:903 (HBG2) at positions 2723-2776. In other embodiments, the “CCAAT box target region” denotes the region that is at or near the distal CCAAT box and includes the nucleotides of the distal CCAAT box and 5 nucleotides upstream (5′) and 5 nucleotides downstream (3′) of the distal CCAAT box (i.e., HBG1/2 c.-106 to -120 (Genomic location is Hg38 Chr11: 5249963 to Hg38 Chr11: 5249977 (HGB1 and Hg38 Chr11: 5254887 to Hg38 Chr11: 5254901, respectively)). The HBG1 c.-106 to -120 region is exemplified in SEQ ID NO:902 (HBG1) at positions 2818-2832, and the HBG2 c.-106 to -120 region is exemplified in SEQ ID NO:903 (HBG2) at positions 2742-2756. The term “CCAAT box target site alteration” and the like refer to alterations (e.g., deletions, insertions, mutations) of one or more nucleotides of the CCAAT box target region. Examples of exemplary CCAAT box target region alterations include, without limitation, the 1 nt deletion, 4 nt deletion, 11nt deletion, 13 nt deletion, and 18 nt deletion, and -117 G>A alteration. As used herein, the terms “CCAAT box” and “CAAT box” can be used interchangeably.

[0157] The notations “c.-114 to -102 region,” “c.-102 to -114 region,” “−102:-114,” “13 nt target region” and the like refer to a sequence that is 5′ of the transcription start site (TSS) of the HBG1 and/or HBG2 gene at the genomic location Hg38 Chr11: 5,249,959 to Hg38 Chr11: 5,249,971 and Hg38 Chr11: 5,254,883 to Hg38 Chr11: 5,254,895, respectively. The HBG1 c.-102 to -114 region is exemplified in SEQ ID NO:902 (HBG1) at positions 2824-2836 and the HBG2 c.-102 to -114 region is exemplified in SEQ ID NO:903 (HBG2) at positions 2748-2760. The term “13 nt deletion” and the like refer to deletions of the 13 nt target region.

[0158] The notations “c.-121 to -104 region,” “c.-104 to -121 region,” “−104:-121,” “18 nt target region,” and the like refer to a sequence that is 5′ of the transcription start site (TSS) of the HBG1 and/or HBG2 gene at the genomic location Hg38 Chr11: 5,249,961 to Hg38 Chr11: 5,249,978 and Hg38 Chr11: 5,254,885 to Hg38 Chr11: 5,254,902, respectively. The HBG1 c.-104 to -121 region is exemplified in SEQ ID NO:902 (HBG1) at positions 2817-2834, and the HBG2 c.-104 to -121 region is exemplified in SEQ ID NO:903 (HBG2) at positions 2741-2758. The term “18 nt deletion” and the like refer to deletions of the 18 nt target region.

[0159] The notations “c.-105 to -115 region,” “c.-115 to -105 region,” “−105:-115,” “11 nt target region,” and the like refer to a sequence that is 5′ of the transcription start site (TSS) of the HBG1 and/or HBG2 gene at the genomic location Hg38 Chr11: 5,249,962 to Hg38 Chr11: 5,249,972 and Hg38 Chr11: 5,254,886 to Hg38 Chr11: 5,254,896, respectively. The HBG1 c.-105 to -115 region is exemplified in SEQ ID NO:902 (HBG1) at positions 2823-2833, and the HBG2 c.-105 to -115 region is exemplified in SEQ ID NO:903 (HBG2) at positions 2747-2757. The term “11 nt deletion” and the like refer to deletions of the 11 nt target region.

[0160] The notations “c.-115 to -112 region,” “c.-112 to -115 region,” “−112:-115,” “4 nt target region,” and the like refer to a sequence that is 5′ of the transcription start site (TSS) of the HBG1 and/or HBG2 gene at the genomic location Hg38 Chr11: 5,249,969 to Hg38 Chr11: 5,249,972 and Hg38 Chr11: 5,254,893 to Hg38 Chr11: 5,254,896, respectively. The HBG1 c.-112 to -115 region is exemplified in SEQ ID NO:902 at positions 2823-2826, and the HBG2 c.-112 to -115 region is exemplified in SEQ ID NO:903 (HBG2) at positions 2747-2750. The term “4 nt deletion” and the like refer to deletions of the 4 nt target region.

[0161] The notations “c.-116 region,” “HBG-116,” “1 nt target region,” and the like refer to a sequence that is 5′ of the transcription start site (TSS) of the HBG1 and/or HBG2 gene at the genomic location Hg38 Chr11: 5,249,973 and Hg38 Chr11: 5,254,897, respectively. The HBG1 c.-116 region is exemplified in SEQ ID NO:902 at position 2822, and the HBG2 c.-116 region is exemplified in SEQ ID NO:903 (HBG2) at position 2746. The term “1 nt deletion” and the like refer to deletions of the 1 nt target region.

[0162] The notations “c.-117 G>A region,” “HBG-117 G>A,” “−117 G>A target region” and the like refer to a sequence that is 5′ of the transcription start site (TSS) of the HBG1 and/or HBG2 gene at the genomic location Hg38 Chr11: 5,249,974 to Hg38 Chr11: 5,249,974 and Hg38 Chr11: 5,254,898 to Hg38 Chr11: 5,254,898, respectively. The HBG1 c.-117 G>A region is exemplified by a substitution from guanine (G) to adenine (A) in SEQ ID NO:902 at position 2821, and the HBG2 c.-117 G>A region is exemplified by a substitution from G to A in SEQ ID NO:903 (HBG2) at position 2745. The term “−117 G>A alteration” and the like refer to a substitution from G to A at the -117G>A target region.

[0163] The term “proximal HBG1/2 promoter target sequence” denotes the region within 50, 100, 200, 300, 400, or 500 bp of a proximal HBG1/2 promoter sequence including the 13 nt target region. Alterations by genome editing systems according to this disclosure facilitate (e.g. cause, promote or tend to increase the likelihood of) upregulation of HbF production in erythroid progeny.

[0164] The term “GATA1 binding motif in BCL11Ae” refers to the sequence that is the GATA1 binding motif in the erythroid specific enhancer of BCL11A (BCL11Ae) that is in the +58 DNase I hypersensitive site (DHS) region of intron 2 of the BCL11A gene. The genomic coordinates for the GATA1 binding motif in BCL11Ae are chr2: 60,495,265 to 60,495,270. The +58 DHS site comprises a 115 base pair (bp) sequence as set forth in SEQ ID NO:968. The +58 DHS site sequence, including ˜500 bp upstream and ˜200 bp downstream is set forth in SEQ ID NO:969.

[0165] Where ranges are provided herein, endpoints are included. Furthermore, it is to be understood that unless otherwise indicated or otherwise evident from the context and/or the understanding of one of ordinary skill in the art, values that are expressed as ranges can assume any specific value within the stated ranges in different embodiments of the invention, to the tenth of the unit of the lower limit of the range, unless the context clearly dictates otherwise. It is also to be understood that unless otherwise indicated or otherwise evident from the context and/or the understanding of one of ordinary skill in the art, values expressed as ranges can assume any subrange within the given range, wherein the endpoints of the subrange are expressed to the same degree of accuracy as the tenth of the unit of the lower limit of the range.

### Overview

[0166] The various embodiments of this disclosure generally relate to genome editing systems configured to introduce alterations (e.g., a deletion or insertion, or other mutation) into chromosomal DNA that enhance transcription of the HBG1 and/or HBG2 genes, which encode the A_{γ} and G_{γ} subunits of hemoglobin, respectively. In certain embodiments, increased expression of one or more γ-globin genes (e.g., HBG1, HBG2) using the methods provided herein results in preferential formation of HbF over HbA and/or increased HbF levels as a percentage of total hemoglobin. In certain embodiments, the disclosure generally relates to the use of RNP complexes comprising a gRNA complexed to a Cpf1 molecule. In certain embodiments, the gRNA may be unmodified or modified, the Cpf1 molecule may be a wild-type Cpf1 protein or a modified Cpf1 protein. In certain embodiments, the gRNA may comprise a sequence set forth in Table 13, Table 18, or Table 19. In certain embodiments, a modified Cpf1 may be encoded by a sequence set forth in SEQ ID NOs: 1000, 1001, 1008-1018, 1032, 1035-39, 1094-1097, 1107-09 (Cpf1 polypeptide sequences) or SEQ ID NOs: 1019-1021, 1110-17 (Cpf1 polynucleotide sequences). In certain embodiments, the RNP complex may comprise an RNP complex set forth in Table 21. For example, the RNP complex may include a gRNA comprising the sequence set forth in SEQ ID NO: 1051 and a modified Cpf1 protein encoded by the sequence set forth in SEQ ID NO:1097 (RNP32, Table 21).

[0167] It has previously been shown that patients with the condition Hereditary Persistence of Fetal Hemoglobin (HPFH) contain mutations in an γ-globin regulatory element that results in fetal γ-globin expression throughout life, rather than being repressed around the time of birth (Martyn 2017). This results in elevated fetal hemoglobin (HbF) expression. HPFH mutations may be deletional or non-deletional (e.g., point mutations). Subjects with HPFH exhibit lifelong expression of HbF, i.e., they do not undergo or undergo only partial globin switching, with no symptoms of anemia.

[0168] HbF expression can be induced through point mutations in an γ-globin regulatory element that is associated with a naturally occurring HPFH variant, including, for example, HBG1 c.-114 C>T; c.-117 G>A; c.-158 C>T; c.-167 C>T; c.-170 G>A; c.-175 T>G; c.-175 T>C; c.-195 C>G; c.-196 C>T; c.-197 C>T; c.-198 T>C; c.-201 C>T; c.-202 C>T; c.-211 C>T, c.-251 T>C; or c.-499 T>A; or HBG2 c.-109 G>T; c.-110 A>C; c.-114 C>A; c.-114 C>T; c.-114 C>G; c.-157 C>T; c.-158 C>T; c.-167 C>T; c.-167 C>A; c.-175 T>C; c.-197 C>T; c.-200+C; c.-202 C>G; c.-211 C>T; c.-228 T>C; c.-255 C>G; c.-309 A>G; c.-369 C>G; or c.-567 T>G.

[0169] Naturally occurring mutations at the distal CCAAT box motif found within the promoter of the HBG1 and/or HBG2 genes (i.e., HBG1/2 c.-111 to -115) have also been shown to result in continued Y-globin expression and the HPFH condition. It is thought that alteration (mutation or deletion) of the CCAAT box may disrupt the binding of one or more transcriptional repressors, resulting in continued expression of the γ-globin gene and elevated HbF expression (Martyn 2017). For example, a naturally occurring 13 base pair del c.-114 to -102 (“13 nt deletion”) has been shown to be associated with elevated levels of HbF (Martyn 2017). The distal CCAAT box likely overlaps with the binding motifs within and surrounding the CCAAT box of negative regulatory transcription factors that are expressed in adulthood and repress HBG (Martyn 2017).

[0170] A gene editing strategy disclosed herein is to increase HbF expression by disrupting one or more nucleotides in the distal CCAAT box and/or surrounding the distal CCAAT box. In certain embodiments, the “CCAAT box target region” may be the region that is at or near the distal CCAAT box and includes the nucleotides of the distal CCAAT box and 25 nucleotides upstream (5′) and 25 nucleotides downstream (3′) of the distal CCAAT box (i.e., HBG1/2 c.-86 to -140). In other embodiments, the “CCAAT box target region” may be the region that is at or near the distal CCAAT box and includes the nucleotides of the distal CCAAT box and 5 nucleotides upstream (5′) and 5 nucleotides downstream (3′) of the distal CCAAT box (i.e., HBG1/2 c.-106 to -120). Unique, non-naturally occurring alterations of the CCAAT box target region are disclosed herein that induce HBG expression including, without limitation, HBG del c.-104 to -121 (“18 nt deletion”), HBG del c.-105 to -115 (“11 nt deletion”), HBG del c.-112 to -115 (“4 nt deletion”), and HBG del c.-116 (“1 nt deletion”). In certain embodiments, genome editing systems disclosed herein may be used to introduce alterations into the CCAAT box target region of HBG1 and/or HBG2. In certain embodiments, the genome editing systems may include one or more of a DNA donor template that encodes an alteration (such as a deletion, insertion, or mutation) in the CCAAT box target region. In certain embodiments, the alterations may be non-naturally occurring alterations or naturally occurring alterations. In certain embodiments, the donor templates may encode the 1 nt deletion, 4 nt deletion, 11 nt deletion, 13 nt deletion, 18 nt deletion, or c.-117 G>A alteration. In certain embodiments, the genome editing systems may include an RNA guided nuclease including a Cas9, modified Cas 9, a Cpf1, or modified Cpf1. In certain embodiments, the genome editing systems may include an RNP comprising a gRNA and a Cpf1 molecule. In certain embodiments, a gRNA may be unmodified or modified, the Cpf1 molecule may be a wild-type Cpf1 protein or a modified Cpf1 protein, or a combination thereof. In certain embodiments, the gRNA may comprise a sequence set forth in Table 13, Table 18, or Table 19. In certain embodiments, a modified Cpf1 may be encoded by a sequence set forth in SEQ ID NOs: 1000, 1001, 1008-1018, 1032, 1035-39, 1094-1097, 1107-09 (Cpf1 polypeptide sequences) or SEQ ID NOs: 1019-1021, 1110-17 (Cpf1 polynucleotide sequences). In certain embodiments, the RNP complex may comprise an RNP complex set forth in Table 21. For example, the RNP complex may include a gRNA comprising the sequence set forth in SEQ ID NO:1051 and a modified Cpf1 protein encoded by the sequence set forth in SEQ ID NO:1097 (RNP32, Table 21).

[0171] HbF expression can also be induced through targeted disruption of the erythroid cell specific expression of a transcriptional repressor, BCL11A, which encodes a repressor that silences HBG1 and HBG2 (Canvers 2015). Another gene editing strategy disclosed herein is to increase HbF expression by targeting disruption the of the erythroid specific enhancer of BCL11A (BCL11Ae) (also discussed in commonly-assigned International Patent Publication No. WO 2015/148860 by Friedland et al. (“Friedland”), published Oct. 1, 2015, which is incorporated by reference in its entirety herein). In certain embodiments, the region of BCL11Ae targeted for disruption may be the GATA1 binding motif in BCL11Ae. In certain embodiments, genome editing systems disclosed herein may be used to introduce alterations into the GATA1 binding motif in BCL11Ae, the CCAAT box target region, the 13 nt target region of HBG1 and/or HBG2, or a combination thereof.

[0172] The genome editing systems of this disclosure can include an RNA-guided nuclease such as Cas9 or Cpf1 and one or more gRNAs having a targeting domain that is complementary to a sequence in or near the target region, and optionally one or more of a DNA donor template that encodes a specific mutation (such as a deletion or insertion) in or near the target region, and/or an agent that enhances the efficiency with which such mutations are generated including, without limitation, a random oligonucleotide, a small molecule agonist or antagonist of a gene product involved in DNA repair or a DNA damage response, or a peptide agent.

[0173] A variety of approaches to the introduction of mutations into the CCAAT box target region, 13 nt target region, proximal HBG1/2 promoter target sequence, and/or the GATA1 binding motif in BCL11Ae may be employed in the embodiments of the present disclosure. In one approach, a single alteration, such as a double-strand break, is made within the CCAAT box target region, 13 nt target region, proximal HBG1/2 promoter target sequence, and/or the GATA1 binding motif in BCL11Ae, and is repaired in a way that disrupts the function of the region, for example by the formation of an indel or by the incorporation of a donor template sequence that encodes the deletion of the region. In a second approach, two or more alterations are made on either side of the region, resulting in the deletion of the intervening sequence, including the CCAAT box target region, 13 nt target region and/or the GATA1 binding motif in BCL11Ae.

[0174] The treatment of hemoglobinopathies by gene therapy and/or genome editing is complicated by the fact that the cells that are phenotypically affected by the disease, erythrocytes or RBCs, are enucleated, and do not contain genetic material encoding either the aberrant hemoglobin protein (Hb) subunits nor the Aγ or Gγ subunits targeted in the exemplary genome editing approaches described above. This complication is addressed, in certain embodiments of this disclosure, by the alteration of cells that are competent to differentiate into, or otherwise give rise to, erythrocytes. Cells within the erythroid lineage that are altered according to various embodiments of this disclosure include, without limitation, hematopoietic stem and progenitor cells (HSCs), erythroblasts (including basophilic, polychromatic and/or orthochromatic erythroblasts), proerythroblasts, polychromatic erythrocytes or reticulocytes, embryonic stem (ES) cells, and/or induced pluripotent stem (iPSC) cells. These cells may be altered in situ (e.g. within a tissue of a subject) or ex vivo. Implementations of genome editing systems for in situ and ex vivo alteration of cells is described under the heading “Implementation of genome editing systems: delivery, formulations, and routes of administration” below.

[0175] In certain embodiments, alterations that result in induction of Aγ and/or Gγ expression are obtained through the use of a genome editing system comprising an RNA-guided nuclease and at least one gRNA having a targeting domain complementary to a sequence within the CCAAT box target region of HBG1 and/or HBG2 or proximate thereto (e.g., within 10, 20, 30, 40, or 50, 100, 200, 300, 400 or 500 bases of the CCAAT box target region). As is discussed in greater detail below, the RNA-guided nuclease and gRNA form a complex that is capable of associating with and altering the CCAAT box target region or a region proximate thereto. Examples of suitable gRNAs and gRNA targeting domains directed to the CCAAT box target region of HBG1 and/or HBG2 or proximate thereto for use in the embodiments disclosed herein include, without limitation, those set forth in SEQ ID NOs: 251-901, 940-942, 970, 971, 996, 997, 1002, and 1004.

[0176] In certain embodiments, alterations that result in induction of Aγ and/or Gγ expression are obtained through the use of a genome editing system comprising an RNA-guided nuclease and at least one gRNA having a targeting domain complementary to a sequence within the 13 nt target region of HBG1 and/or HBG2 or proximate thereto (e.g., within 10, 20, 30, 40, or 50, 100, 200, 300, 400 or 500 bases of the 13 nt target region). As is discussed in greater detail below, the RNA-guided nuclease and gRNA form a complex that is capable of associating with and altering the 13 nt target region or a region proximate thereto. Examples of suitable gRNAs and gRNA targeting domains directed to the 13 nt target region of HBG1 and/or HBG2 or proximate thereto for use in the embodiments disclosed herein include, without limitation, those set forth in SEQ ID NOs: 251-901, 940-942, 970, 971, 996, 997, 1002, and 1004.

[0177] In certain embodiments, alterations that result in induction of HbF expression are obtained through the use of a genome editing system comprising an RNA-guided nuclease and at least one gRNA having a targeting domain complementary to a sequence within the GATA1 binding motif in BCL11Ae or proximate thereto (e.g., within 10, 20, 30, 40, or 50, 100, 200, 300, 400 or 500 bases of the GATA1 binding motif in BCL11Ae). In certain embodiments, the RNA-guided nuclease and gRNA form a complex that is capable of associating with and altering the GATA1 binding motif in BCL11Ae. Examples of suitable targeting domains directed to the GATA1 binding motif in BCL11Ae for use in the embodiments disclosed herein include, without limitation, those set forth in SEQ ID NOs: 952-955.

[0178] The genome editing system can be implemented in a variety of ways, as is discussed below in detail. As an example, a genome editing system of this disclosure can be implemented as a ribonucleoprotein complex or a plurality of complexes in which multiple gRNAs are used. This ribonucleoprotein complex can be introduced into a target cell using art-known methods, including electroporation, as described in commonly-assigned International Patent Publication No. WO 2016/182959 by Jennifer Gori (“Gori”), published Nov. 17, 2016, which is incorporated by reference in its entirety herein.

[0179] The ribonucleoprotein complexes within these compositions are introduced into target cells by art-known methods, including without limitation electroporation (e.g. using the Nucleofection™ technology commercialized by Lonza, Basel, Switzerland or similar technologies commercialized by, for example, Maxcyte Inc. Gaithersburg, Maryland) and lipofection (e.g. using Lipofectamine™ reagent commercialized by Thermo Fisher Scientific, Waltham Massachusetts). Alternatively, or additionally, ribonucleoprotein complexes are formed within the target cells themselves following introduction of nucleic acids encoding the RNA-guided nuclease and/or gRNA. These and other delivery modalities are described in general terms below and in Gori.

[0180] Cells that have been altered ex vivo according to this disclosure can be manipulated (e.g. expanded, passaged, frozen, differentiated, de-differentiated, transduced with a transgene, etc.) prior to their delivery to a subject. The cells are, variously, delivered to a subject from which they are obtained (in an “autologous” transplant), or to a recipient who is immunologically distinct from a donor of the cells (in an “allogeneic” transplant).

[0181] In some cases, an autologous transplant includes the steps of obtaining, from the subject, a plurality of cells, either circulating in peripheral blood, or within the marrow or other tissue (e.g. spleen, skin, etc.), and manipulating those cells to enrich for cells in the erythroid lineage (e.g. by induction to generate iPSCs, purification of cells expressing certain cell surface markers such as CD34, CD90, CD49f and/or not expressing surface markers characteristic of non-erythroid lineages such as CD10, CD14, CD38, etc.). The cells are, optionally or additionally, expanded, transduced with a transgene, exposed to a cytokine or other peptide or small molecule agent, and/or frozen/thawed prior to transduction with a genome editing system targeting the CCAAT box target region, the 13 nt target region, proximal HBG1/2 promoter target sequence, and/or the GATA1 binding motif in BCL11Ae. The genome editing system can be implemented or delivered to the cells in any suitable format, including as a ribonucleoprotein complex, as separated protein and nucleic acid components, and/or as nucleic acids encoding the components of the genome editing system.

[0182] In certain embodiments, CD34+ hematopoietic stem and progenitor cells (HSPCs) that have been edited using the genome editing methods disclosed herein may be used for the treatment of a hemoglobinopathy in a subject in need thereof. In certain embodiments, the hemoglobinopathy may be severe sickle cell disease (SCD) or thalassemia, such as β-thalassemia, δ-thalassemia, or β/δ-thalassemia. In certain embodiments, an exemplary protocol for treatment of a hemoglobinopathy may include harvesting CD34+HSPCs from a subject in need thereof, ex vivo editing of the autologous CD34+HSPCs using the genome editing methods disclosed herein, followed by reinfusion of the edited autologous CD34+HSPCs into the subject. In certain embodiments, treatment with edited autologous CD34+HSPCs may result in increased HbF induction.

[0183] Prior to harvesting CD34+HSPCs, in certain embodiments, a subject may discontinue treatment with hydroxyurea, if applicable, and receive blood transfusions to maintain sufficient hemoglobin (Hb) levels. In certain embodiments, a subject may be administered intravenous plerixafor (e.g., 0.24 mg/kg) to mobilize CD34+HSPCs from bone marrow into peripheral blood. In certain embodiments, a subject may undergo one or more leukapheresis cycles (e.g., approximately one month between cycles, with one cycle defined as two plerixafor-mobilized leukapheresis collections performed on consecutive days). In certain embodiments, the number of leukapheresis cycles performed for a subject may be the number required to achieve a dose of edited autologous CD34+HSPCs (e.g., ≥2×10⁶ cells/kg, ≥3×10⁶ cells/kg, ≥4×10⁶ cells/kg, ≥5×10⁶ cells/kg, 2×10⁶ cells/kg to 3×10⁶ cells/kg, 3×10⁶ cells/kg to 4×10⁶ cells/kg, 4×10⁶ cells/kg to 5×10⁶ cells/kg) to be reinfused back into the subject, along with a dose of unedited autologous CD34+HSPCs/kg for backup storage (e.g., ≥1.5×10⁶ cells/kg). In certain embodiments, the CD34+HSPCs harvested from the subject may be edited using any of the genome editing methods discussed herein. In certain embodiments, any one or more of the gRNAs and one or more of the RNA-guided nucleases disclosed herein may be used in the genome editing methods.

[0184] In certain embodiments, the treatment may include an autologous stem cell transplant. In certain embodiments, a subject may undergo myeloablative conditioning with busulfan conditioning (e.g., dose-adjusted based on first-dose pharmacokinetic analysis, with a test dose of 1 mg/kg). In certain embodiments, conditioning may occur for four consecutive days. In certain embodiments, following a three-day busulfan washout period, edited autologous CD34+HSPCs (e.g., ≥2×10⁶ cells/kg, ≥3×10⁶ cells/kg, ≥4×10⁶ cells/kg, ≥5×10⁶ cells/kg, 2×10⁶ cells/kg to 3×10⁶ cells/kg, 3×10⁶ cells/kg to 4×10⁶ cells/kg, 4×10⁶ cells/kg to 5×10⁶ cells/kg) may be reinfused into the subject (e.g., into peripheral blood). In certain embodiments, the edited autologous CD34+HSPCs may be manufactured and cryopreserved for a particular subject. In certain embodiments, a subject may attain neutrophil engraftment following a sequential myeloablative conditioning regimen and infusion of edited autologous CD34+ cells. Neutrophil engraftment may be defined as three consecutive measurements of ANC≥0.5×10⁹/L.

[0185] However it is implemented, a genome editing system may include, or may be co-delivered with, one or more factors that improve the viability of the cells during and after editing, including without limitation an aryl hydrocarbon receptor antagonist such as StemRegenin-1 (SR1), UM171, LGC0006, alpha-napthoflavone, and CH-223191, and/or an innate immune response antagonist such as cyclosporin A, dexamethasone, reservatrol, a MyD88 inhibitory peptide, an RNAi agent targeting Myd88, a B18R recombinant protein, a glucocorticoid, OxPAPC, a TLR antagonist, rapamycin, BX795, and a RLR shRNA. These and other factors that improve the viability of the cells during and after editing are described in Gori, under the heading “I. Optimization of Stem Cells” from page 36 through page 61, which is incorporated by reference herein.

[0186] The cells, following delivery of the genome editing system, are optionally manipulated e.g. to enrich for HSCs and/or cells in the erythroid lineage and/or for edited cells, to expand them, freeze/thaw, or otherwise prepare the cells for return to the subject. The edited cells are then returned to the subject, for instance in the circulatory system by means of intravenous delivery or delivery or into a solid tissue such as bone marrow.

[0187] Functionally, alteration of the CCAAT box target region, 13 nt target region, proximal HBG1/2 promoter target sequence, and/or the GATA1 binding motif in BCL11Ae using the compositions, methods and genome editing systems of this disclosure results in significant induction, among hemoglobin-expressing cells, of Aγ and/or Gγ subunits (referred to interchangeably as HbF expression), e.g. at least 5%, 10%, 15%, 20%, 25%, 30%, 35%, 40%, 45%, 50% or greater induction of Aγ and/or Gγ subunit expression relative to unmodified controls. This induction of protein expression is generally the result of alteration of the CCAAT box target region, 13 nt target region, proximal HBG1/2 promoter target sequence, and/or the GATA1 binding motif in BCL11Ae (expressed, e.g. in terms of the percentage of total genomes comprising indel mutations within the plurality of cells) in some or all of the plurality of cells that are treated, e.g. at least 5%, 10%, 15%, 20%, 25%, 30%, 35%, 40%, 45%, 50% of the plurality of cells comprise at least one allele comprising a sequence alteration, including, without limitation, an indel, insertion, or deletion in or near the CCAAT box target region, 13 nt target region, proximal HBG1/2 promoter target sequence, and/or the GATA1 binding motif in BCL11Ae.

[0188] The functional effects of alterations caused or facilitated by the genome editing systems and methods of the present disclosure can be assessed in any number of suitable ways. For example, the effects of alterations on expression of fetal hemoglobin can be assessed at the protein or mRNA level. Expression of HBG1 and HBG2 mRNA can be assessed by digital droplet PCR (ddPCR), which is performed on cDNA samples obtained by reverse transcription of mRNA harvested from treated or untreated samples. Primers for HBG1, HBG2, HBB, and/or HBA may be used individually or multiplexed using methods known in the art. For example, ddPCR analysis of samples may be conducted using the QX200™ ddPCR system commercialized by Bio Rad (Hercules, CA), and associated protocols published by BioRad. Fetal hemoglobin protein may be assessed by high pressure liquid chromatography (HPLC), for example, according to the methods discussed on pp. 143-44 in Chang 2017 (incorporated by reference herein), or fast protein liquid chromatography (FPLC), using ion-exchange and/or reverse phase columns to resolve HbF, HbB and HbA and/or Aγ and Gγ globin chains as is known in the art.

[0189] It should be noted that the rate at which the CCAAT box target region (e.g., 18 nt, 11 nt, 4 nt, 1 nt, c.-117 G>A target regions), 13 nt target region, proximal HBG1/2 promoter target sequence, and/or the GATA1 binding motif in BCL11Ae is altered in the target cells can be modified by the use of optional genome editing system components such as oligonucleotide donor templates. Donor template design is described in general terms below under the heading “Donor template design.” Donor templates for use in targeting the 13 nt target region may include, without limitation, donor templates encoding alterations (e.g., deletions) of HBG1 c.-114 to -102 (corresponding to nucleotides 2824-2836 of SEQ ID NO: 902), HBG1 c.-225 to -222 (corresponding to nucleotides 2716-2719 of SEQ ID NO:902)), and/or HBG2 c.-114 to -102 (corresponding to nucleotides 2748-2760 of SEQ ID NO:903). Exemplary 5′ and 3′ homology arms, and exemplary full-length donor templates encoding deletions such as c.-114 to -102 are also presented below (SEQ ID NOS: 904-909). In certain embodiments, donor templates for use in targeting the 18 nt target region may include, without limitation, donor templates encoding alterations (e.g., deletions) of HBG1 c.-104 to -121, HBG2 c.-104 to -121, or a combination thereof. Exemplary full-length donor templates encoding deletions such as c.-104 to -121 include SEQ ID NOs: 974 and 975. In certain embodiments, donor templates for use in targeting the 11 nt target region may include, without limitation, donor templates encoding alterations (e.g., deletions) of HBG1 c.-105 to -115, HBG2 c.-105 to -115, or a combination thereof. Exemplary full-length donor templates encoding deletions such as c.-105 to -115 include SEQ ID NOs: 976 and 978. In certain embodiments, donor templates for use in targeting the 4 nt target region may include, without limitation, donor templates encoding alterations (e.g., deletions) of HBG1 c.-112 to -115, HBG2 c.-112 to -115, or a combination thereof. Exemplary full-length donor templates encoding deletions such as c.-112 to -115 include SEQ ID NOs: 984-995. In certain embodiments, donor templates for use in targeting the 1 nt target region may include, without limitation, donor templates encoding alterations (e.g., deletions) of HBG1 c.-116, HBG2 c.-116, or a combination thereof. Exemplary full-length donor templates encoding deletions such as c.-116 include SEQ ID NOs: 982 and 983. In certain embodiments, donor templates for use in targeting the c.-117 G>A target region may include, without limitation, donor templates encoding alterations (e.g., deletions) of HBG1 c.-117 G>A, HBG2 c.-117 G>A, or a combination thereof. Exemplary full-length donor templates encoding deletions such as c.-117 G>A include SEQ ID NOs: 980 and 981. In certain embodiments, the donor template may be a positive strand or a negative strand.

[0190] Donor templates used herein may be non-specific templates that are non-homologous to regions of DNA within or near the target sequence. In certain embodiments, donor templates for use in targeting the 13 nt target region may include, without limitation, non-target specific templates that are nonhomologous to regions of DNA within or near the 13 nt target region. For example, a non-specific donor template for use in targeting the 13 nt target region may be non-homologous to the regions of DNA within or near the 13 nt target region and may comprise a donor template encoding the deletion of HBG1 c.-225 to -222 (corresponding to nucleotides 2716-2719 of SEQ ID NO:902). In certain embodiments, donor templates for use in targeting the GATA1 binding motif in BCL11Ae may include, without limitation, non-target specific templates that are nonhomologous to regions of DNA within or near GATA1 binding motif in BCL11Ae target sequence. Other donor templates for use in targeting BCL11Ae may include, without limitation, donor templates including alterations (e.g., deletions) of BCL11Ae, including, without limitation, the GATA1 motif in BCL11Ae.

[0191] The embodiments described herein may be used in all classes of vertebrate including, but not limited to, primates, mice, rats, rabbits, pigs, dogs, and cats.

[0192] This overview has focused on a handful of exemplary embodiments that illustrate the principles of genome editing systems and CRISPR-mediated methods of altering cells. For clarity, however, this disclosure encompasses modifications and variations that have not been expressly addressed above, but will be evident to those of skill in the art. With that in mind, the following disclosure is intended to illustrate the operating principles of genome editing systems more generally. What follows should not be understood as limiting, but rather illustrative of certain principles of genome editing systems and CRISPR-mediated methods utilizing these systems, which, in combination with the instant disclosure, will inform those of skill in the art about additional implementations and modifications that are within its scope.

### RNA-Guided Helicases, Guide RNAs and Dead Guide RNAs

[0193] Various embodiments of the present disclosure also generally relate to genome editing systems configured to alter the helical structure of a nucleic acid to enhance genome editing of a target region (e.g., the CCAAT box target region, 13 nt target region, proximal HBG1/2 promoter target sequence, and/or the GATA1 binding motif in BCL11Ae) in the nucleic acid, and methods and compositions thereof. Many embodiments relate to the observation that positioning an event that alters the helical structure of DNA within or adjacent to target regions in nucleic acid may improve the activity of genome editing systems directed to such target regions. Without wishing to be bound by any theory, it is thought that alterations of helical structure (e.g., by unwinding) within or proximal to DNA target regions may induce or increase accessibility of a genome editing system to the target region, resulting in increased editing of the target regions by the genome editing system.

[0194] CRISPR nucleases evolved primarily to defend bacteria against viral pathogens, whose genomes are not naturally organized into chromatin. By contrast, when eukaryotic genomes are organized into nucleosomal units comprising genomic DNA segments coiled around histones. CRISPR nucleases from several bacterial families have been found to be inactive for editing eukaryotic DNA, suggesting the ability to edit nucleosome-bound DNA might differ across enzymes (Ran 2015). Biochemical evidence shows that S. pyogenes Cas9 can cleave DNA efficiently at nucleosome edges, but has reduced activity when the target site is positioned near the center of nucleosome dyad (Hinz 2016).

[0195] In many cell types, target sites of interest may be strongly bound by nucleosomes, or may only possess adjacent PAMs for enzymes that do not edit efficiently in the presence of nucleosomes. In this case, the problematic nucleosomes could be displaced first by using adjacent target sites that are closer to the nucleosome edge or are bound by an enzyme that is more effective at binding nucleosomal DNA. However, cleavage at these adjacent sites could be detrimental to the therapeutic strategy. Therefore, having a programmable enzyme that binds these adjacent sites but does not cleave can enable more efficient functional editing.

[0196] A related strategy utilizes recruitment of exogenous trans-acting factors to facilitate nucleosome displacement. However, the systems and methods of this disclosure are advantageous over this strategy because they do not require gRNA modifications beyond truncation of the targeting domain, do not require the recruitment of exogenous trans-acting factors, and do not require transcriptional activation to achieve increased rates of editing.

[0197] A variety of approaches to the unwinding and alteration of nucleic acid are employed in the various embodiments of this disclosure. One approach comprises unwinding (or opening of) a chromatin segment within or proximal to a target region (e.g., the CCAAT box target region, 13 nt target region, proximal HBG1/2 promoter target sequence, and/or the GATA1 binding motif in BCL11Ae) of a nucleic acid in a cell and generating a double stranded break (DSB) within the target region of the nucleic acid whereby the target region is altered. In certain embodiments, the DSB may be repaired in a manner that alters the target region. Unwinding the chromatin segment using the methods provided herein may facilitate increased access of catalytically active RNPs (e.g., catalytically active RNA-guided nucleases and gRNAs) to the chromatin to allow for more efficient editing of the DNA. For example, these methods may be used to edit target regions in chromatin that are difficult for a ribonucleoprotein (e.g., RNA-guided nuclease complexed to gRNA) to access because the chromatin is occupied by nucleosomes, such as closed chromatin. In certain embodiments, the unwinding of the chromatin segment occurs via RNA-guided helicase activity. In certain embodiments, the unwinding step does not require recruiting an exogenous trans-acting factor to the chromatin segment. In certain embodiments, the step of unwinding the chromatin segment does not comprise forming a single or double-stranded break in the nucleic acid within the chromatin segment.

[0198] In certain embodiments of the approaches and methods described above, the alteration of DNA helical structure is achieved through the action of an “RNA-guided helicase,” which term is generally used to refer to a molecule, typically a peptide, that (a) interacts (e.g., complexes) with a gRNA, and (b) together with the gRNA, associates with and unwinds a target site. RNA-guided helicases may, in certain embodiments, comprise RNA-guided nucleases configured to lack nuclease activity. However, the inventors have observed that even a cleavage-competent RNA-guided nuclease may be adapted for use as an RNA-guided helicase by complexing it to a dead gRNA having a truncated targeting domain of 15 or fewer nucleotides in length. Complexes of wild-type RNA-guided nucleases with dead gRNAs exhibit reduced or eliminated RNA-cleavage activity, but appear to retain helicase activity. RNA-guided helicases and dead gRNAs are described in greater detail below.

[0199] Regarding RNA-guided helicases, according to the present disclosure an RNA-guided helicase may comprise any of the RNA-guided nucleases disclosed herein and infra under the heading entitled “RNA-guided nucleases,” including, without limitation, a Cas9 or Cpf1 RNA-guided nuclease. The helicase activity of these RNA-guided nucleases allow for unwinding of DNA, providing increased access of genome editing system components (e.g., without limitation, catalytically active RNA-guided nuclease and gRNAs) to the desired target region to be edited (e.g., the CCAAT box target region, 13 nt target region, proximal HBG1/2 promoter target sequence, and/or the GATA1 binding motif in BCL11Ae). In certain embodiments, the RNA-guided nuclease may be a catalytically active RNA-guided nuclease with nuclease activity. In certain embodiments, the RNA-guided helicase may be configured to lack nuclease activity. For example, in certain embodiments, the RNA-guided helicase may be a catalytically inactive RNA-guided nuclease that lacks nuclease activity, such as a catalytically dead Cas9 molecule, which still provides helicase activity. In certain embodiments, an RNA-guided helicase may form a complex with a dead gRNA, forming a dead RNP that cannot cleave nucleic acid. In other embodiments, the RNA-guided helicase may be a catalytically active RNA-guided nuclease complexed to a dead gRNA, forming a dead RNP that cannot cleave nucleic acid. In certain embodiments, the RNA-guided nuclease is not configured to recruit an exogenous trans-acting factor to the desired target region to be edited (e.g., the CCAAT box target region, 13 nt target region, proximal HBG1/2 promoter target sequence, and/or the GATA1 binding motif in BCL11Ae).

[0200] Turning to dead gRNAs, these include any of the dead gRNAs discussed herein and infra under the heading entitled “Dead gRNA molecules.” Dead gRNAs (also referred to herein as “dgRNAs”) may be generated by truncating the 5′ end of a gRNA targeting domain sequence, resulting in a targeting domain sequence of 15 nucleotides or fewer in length. In certain embodiments, a dgRNA may be generated by truncating the 5′ end of any one of a gRNA targeting domain sequence disclosed herein in Table 2 or Table 10. Dead guide RNA molecules according to the present disclosure include dead guide RNA molecules that have reduced, low, or undetectable cleavage activity. The targeting domain sequences of dead guide RNAs may be shorter in length by 1, 2, 3, 4, 5, 6, 7, 8, 9, or 10 nucleotides compared to the targeting domain sequence of active guide RNAs. Dead gRNA molecules may comprise targeting domains complementary to regions proximal to or within a target region (e.g., the CCAAT box target region, 13 nt target region, proximal HBG1/2 promoter target sequence, and/or the GATA1 binding motif in BCL11Ae) in a target nucleic acid. In certain embodiments, “proximal to” may denote the region within 10, 25, 50, 100, or 200 nucleotides of a target region (e.g., the CCAAT box target region, 13 nt target region, proximal HBG1/2 promoter target sequence, and/or the GATA1 binding motif in BCL11Ae). In certain embodiments, dead gRNAs comprise targeting domains complementary to the transcription strand or non-transcription strand of DNA. In certain embodiments, the dead guide RNA is not configured to recruit an exogenous trans-acting factor to a target region (e.g., the CCAAT box target region, 13 nt target region, proximal HBG1/2 promoter target sequence, and/or the GATA1 binding motif in BCL11Ae).

[0201] Also provided herein are methods of increasing a rate of indel formation in a target nucleic acid by unwinding DNA within or proximal to the target region (e.g., the CCAAT box target region, 13 nt target region, proximal HBG1/2 promoter target sequence, and/or the GATA1 binding motif in BCL11Ae) using an RNA-guided helicase, generating a DSB within the target region, and forming an indel in the target region through repair of the DSB. The step of unwinding the DNA using an RNA-guided helicase provides for increased indel formation compared to a method of forming indels that does not use a helicase.

[0202] This disclosure further encompasses methods of deleting a segment of a target nucleic acid in a cell, comprising contacting the cell with an RNA-guided helicase and generating a double strand break (DSB) within the target region (e.g., the CCAAT box target region, 13 nt target region, proximal HBG1/2 promoter target sequence, and/or the GATA1 binding motif in BCL11Ae). In certain embodiments, the RNA-guided helicase is configured to associate within or proximal to a target region of the target nucleic acid and unwind double stranded DNA (dsDNA) within or proximal to the target region. In certain embodiments, the target nucleic acid is a promoter region of a gene, a coding region of a gene, a non-coding region of a gene, an intron of a gene, or an exon of a gene. In certain embodiments, the segment of the target nucleic acid to be deleted may is at least about 15, 20, 25, 30, 35, 40, 45, 50, 55, 60, 65, 70, 75, or 100 base pairs in length. In certain embodiments, the DSB is repaired in a manner that deletes the segment of the target nucleic acid.

[0203] Genome editing systems configured to introduce alterations of helical structure may be implemented in a variety of ways, as is discussed below in detail. As an example, a genome editing system of this disclosure can be implemented as a ribonucleoprotein complex or a plurality of complexes in which multiple gRNAs are used. In certain embodiments, a ribonucleoprotein complex of the genome editing system may be an RNA-guided helicase complexed to a dead guide RNA. Ribonucleoprotein complexes can be introduced into a target cell using art-known methods, including electroporation, as described in Gori. Genome editing systems incorporating RNA-guided helicases may also be modified in any suitable manner, including without limitation by the inclusion of one or more of a DNA donor template that encodes a specific mutation (such as a deletion or insertion) in or near the target region, and/or an agent that enhances the efficiency with which such mutations are generated including, without limitation, a random oligonucleotide, a small molecule agonist or antagonist of a gene product involved in DNA repair or a DNA damage response, or a peptide agent. These modifications are described in greater detail below, under the heading “Genome Editing Strategies.” For clarity, this disclosure includes compositions comprising one or more gRNAs, dead gRNAs, RNA-guided helicases, RNA-guided nucleases, or a combination thereof.

[0204] While several of the exemplary embodiments above have focused on DNA unwinding, it should be noted that other helical alterations are within the scope of the present disclosure. These include, without limitation, overwinding, underwinding, increase or decrease of torsional strain on DNA strands within or proximate to a target region (e.g., through topoisomerase activity), denaturation or strand separation, and/or other suitable alterations resulting in modifications of chromatin structure. Each of these alterations may be catalyzed by an RNA-guided activity, or by the recruitment of an endogenous factor to a target region.

[0205] Also provided herein are genome editing systems and methods of altering one or more indels (e.g., indel signature) generated by an active guide. As the inventors have discovered herein, pairing of a dead RNP (dRNP) (i.e., a dead guide RNA complexed with an RNA-guided nuclease) and an active RNP (i.e., an active guide RNA complexed with an RNA-guided nuclease) can result in a change of the directionality of the indels (e.g., indel signature) generated by the active RNP alone (without a dRNP). As shown in the examples below, the use of the dead guide RNA may result in an increased frequency of larger deletions extending from the active guide RNA cut site toward the dead guide RNA binding site. Thus, the dead guide RNA may be used to effectively “orient” deletion editing toward a desired target site. In certain embodiments, the use of the dead guide RNA with an active guide RNA may increase the frequency of deletions that are not associated with micro-homologies.

[0206] Although the examples disclosed in the Examples section below are directed to alterations of the CCAAT box target region, skilled artisans would contemplate that the genome editing systems, methods, cells and compositions described herein may be used to alter any other target region, for example, without limitation, to increase the frequency of deletions at the target region, increase the frequency of deletions at the target region that are not associated with micro-homologies (e.g., not repaired via MMEJ).

[0207] This overview has focused on a handful of exemplary embodiments that illustrate the principles of genome editing systems and CRISPR-mediated methods of altering cells. For clarity, however, this disclosure encompasses modifications and variations that have not been expressly addressed above, but will be evident to those of skill in the art. With that in mind, the following disclosure is intended to illustrate the operating principles of genome editing systems more generally. What follows should not be understood as limiting, but rather illustrative of certain principles of genome editing systems and CRISPR-mediated methods utilizing these systems, which, in combination with the instant disclosure, will inform those of skill in the art about additional implementations and modifications that are within its scope.

### Genome Editing Systems

[0208] The term “genome editing system” refers to any system having RNA-guided DNA editing activity. Genome editing systems of the present disclosure include at least two components adapted from naturally occurring CRISPR systems: a guide RNA (gRNA) and an RNA-guided nuclease. These two components form a complex that is capable of associating with a specific nucleic acid sequence and editing the DNA in or around that nucleic acid sequence, for instance by making one or more of a single-strand break (an SSB or nick), a double-strand break (a DSB) and/or a point mutation.

[0209] In certain embodiments, the genome editing systems in this disclosure may include a helicase for unwinding DNA. In certain embodiments, the helicase may be an RNA-guided helicase. In certain embodiments, the RNA-guided helicase may be an RNA-guided nuclease as described herein, such as a Cas9 or Cpf1 molecule. In certain embodiments, the RNA-guided nuclease is not configured to recruit an exogenous trans-acting factor to a target region. In certain embodiments, the RNA-guided nuclease may be configured to lack nuclease activity. In certain embodiments, the RNA-guided helicase may be complexed with a dead guide RNA as disclosed herein. For example, the dead guide RNA (dgRNA) may comprise a targeting domain sequence less than 15 nucleotides in length. In certain embodiments, the dead guide RNA is not configured to recruit an exogenous trans-acting factor to a target region.

[0210] Naturally occurring CRISPR systems are organized evolutionarily into two classes and five types (Makarova 2011, incorporated by reference herein), and while genome editing systems of the present disclosure may adapt components of any type or class of naturally occurring CRISPR system, the embodiments presented herein are generally adapted from Class 2, and type II or V CRISPR systems. Class 2 systems, which encompass types II and V, are characterized by relatively large, multidomain RNA-guided nuclease proteins (e.g., Cas9 or Cpf1) and one or more guide RNAs (e.g., a crRNA and, optionally, a tracrRNA) that form ribonucleoprotein (RNP) complexes that associate with (i.e. target) and cleave specific loci complementary to a targeting (or spacer) sequence of the crRNA. Genome editing systems according to the present disclosure similarly target and edit cellular DNA sequences, but differ significantly from CRISPR systems occurring in nature. For example, the unimolecular guide RNAs described herein do not occur in nature, and both guide RNAs and RNA-guided nucleases according to this disclosure may incorporate any number of non-naturally occurring modifications.

[0211] Genome editing systems can be implemented (e.g. administered or delivered to a cell or a subject) in a variety of ways, and different implementations may be suitable for distinct applications. For instance, a genome editing system is implemented, in certain embodiments, as a protein/RNA complex (a ribonucleoprotein, or RNP), which can be included in a pharmaceutical composition that optionally includes a pharmaceutically acceptable carrier and/or an encapsulating agent, such as, without limitation, a lipid or polymer micro- or nano-particle, micelle, or liposome. In certain embodiments, a genome editing system is implemented as one or more nucleic acids encoding the RNA-guided nuclease and guide RNA components described above (optionally with one or more additional components); in certain embodiments, the genome editing system is implemented as one or more vectors comprising such nucleic acids, for instance a viral vector such as an adeno-associated virus (see section below under the heading “Implementation of genome editing systems: delivery, formulations, and routes of administration”); and in certain embodiments, the genome editing system is implemented as a combination of any of the foregoing. Additional or modified implementations that operate according to the principles set forth herein will be apparent to the skilled artisan and are within the scope of this disclosure.

[0212] It should be noted that the genome editing systems of the present disclosure can be targeted to a single specific nucleotide sequence, or may be targeted to—and capable of editing in parallel-two or more specific nucleotide sequences through the use of two or more guide RNAs. The use of multiple gRNAs is referred to as “multiplexing” throughout this disclosure, and can be employed to target multiple, unrelated target sequences of interest, or to form multiple SSBs or DSBs within a single target domain and, in some cases, to generate specific edits within such target domain. For example, International Patent Publication No. WO 2015/138510 by Maeder et al. (“Maeder”), which is incorporated by reference herein, describes a genome editing system for correcting a point mutation (C.2991+1655A to G) in the human CEP290 gene that results in the creation of a cryptic splice site, which in turn reduces or eliminates the function of the gene. The genome editing system of Maeder utilizes two guide RNAs targeted to sequences on either side of (i.e. flanking) the point mutation, and forms DSBs that flank the mutation. This, in turn, promotes deletion of the intervening sequence, including the mutation, thereby eliminating the cryptic splice site and restoring normal gene function.

[0213] As another example, WO 2016/073990 by Cotta-Ramusino et al. (“Cotta-Ramusino”), which is incorporated by reference herein, describes a genome editing system that utilizes two gRNAs in combination with a Cas9 nickase (a Cas9 that makes a single strand nick such as S. pyogenes D10A), an arrangement termed a “dual-nickase system.” The dual-nickase system of Cotta-Ramusino is configured to make two nicks on opposite strands of a sequence of interest that are offset by one or more nucleotides, which nicks combine to create a double strand break having an overhang (5′ in the case of Cotta-Ramusino, though 3′ overhangs are also possible). The overhang, in turn, can facilitate homology directed repair events in some circumstances. And, as another example, WO 2015/070083 by Palestrant et al. (incorporated by reference herein) describes a gRNA targeted to a nucleotide sequence encoding Cas9 (referred to as a “governing RNA”), which can be included in a genome editing system comprising one or more additional gRNAs to permit transient expression of a Cas9 that might otherwise be constitutively expressed, for example in some virally transduced cells. These multiplexing applications are intended to be exemplary, rather than limiting, and the skilled artisan will appreciate that other applications of multiplexing are generally compatible with the genome editing systems described here.

[0214] As disclosed herein, in certain embodiments, genome editing systems may comprise multiple gRNAs that may be used to introduce mutations into the GATA1 binding motif in BCL11Ae or the 13 nt target region of HBG1 and/or HBG2. In certain embodiments, genome editing systems disclosed herein may comprise multiple gRNAs used to introduce mutations into the GATA1 binding motif in BCL11Ae and the 13 nt target region of HBG1 and/or HBG2.

[0215] Genome editing systems can, in some instances, form double strand breaks that are repaired by cellular DNA double-strand break mechanisms such as NHEJ or HDR. These mechanisms are described throughout the literature (see, e.g., Davis & Maizels 2014 (describing Alt-HDR); Frit 2014 (describing Alt-NHEJ); Iyama & Wilson 2013 (describing canonical HDR and NHEJ pathways generally)).

[0216] Where genome editing systems operate by forming DSBs, such systems optionally include one or more components that promote or facilitate a particular mode of double-strand break repair or a particular repair outcome. For instance, Cotta-Ramusino also describes genome editing systems in which a single stranded oligonucleotide “donor template” is added; the donor template is incorporated into a target region of cellular DNA that is cleaved by the genome editing system, and can result in a change in the target sequence.

[0217] In certain embodiments, genome editing systems modify a target sequence, or modify expression of a gene in or near the target sequence, without causing single- or double-strand breaks. For example, a genome editing system may include an RNA-guided nuclease fused to a functional domain that acts on DNA, thereby modifying the target sequence or its expression. As one example, an RNA-guided nuclease can be connected to (e.g. fused to) a cytidine deaminase functional domain, and may operate by generating targeted C-to-A substitutions. Exemplary nuclease/deaminase fusions are described in Komor 2016, which is incorporated by reference herein. Alternatively, a genome editing system may utilize a cleavage-inactivated (i.e. a “dead”) nuclease, such as a dead Cas9 (dCas9), and may operate by forming stable complexes on one or more targeted regions of cellular DNA, thereby interfering with functions involving the targeted region(s) including, without limitation, mRNA transcription, chromatin remodeling, etc. In certain embodiments, a genome editing system may include an RNA-guided helicase that unwinds DNA within or proximal to the target sequence, without causing single- or double-stranded breaks. For example a genome editing system may include an RNA-guided helicase configured to associate within or near the target sequence to unwind DNA and induce accessibility to the target sequence. In certain embodiments, the RNA-guided helicase may be complexed to a dead guide RNA that is configured to lack cleavage activity allowing for unwinding of the DNA without causing breaks in the DNA.

Guide RNA (gRNA) Molecules

[0218] The terms “guide RNA” and “gRNA” refer to any nucleic acid that promotes the specific association (or “targeting”) of an RNA-guided nuclease such as a Cas9 or a Cpf1 to a target sequence such as a genomic or episomal sequence in a cell. gRNAs can be unimolecular (comprising a single RNA molecule, and referred to alternatively as chimeric), or modular (comprising more than one, and typically two, separate RNA molecules, such as a crRNA and a tracrRNA, which are usually associated with one another, for instance by duplexing). gRNAs and their component parts are described throughout the literature (see, e.g., Briner 2014, which is incorporated by reference; Cotta-Ramusino). Examples of modular and unimolecular gRNAs that may be used according to the embodiments herein include, without limitation, the sequences set forth in SEQ ID NOs: 29-31 and 38-51. Examples of gRNA proximal and tail domains that may be used according to the embodiments herein include, without limitation, the sequences set forth in SEQ ID NOs: 32-37.

[0219] In bacteria and archea, type II CRISPR systems generally comprise an RNA-guided nuclease protein such as Cas9, a CRISPR RNA (crRNA) that includes a 5′ region that is complementary to a foreign sequence, and a trans-activating crRNA (tracrRNA) that includes a 5′ region that is complementary to, and forms a duplex with, a 3′ region of the crRNA. While not intending to be bound by any theory, it is thought that this duplex facilitates the formation of—and is necessary for the activity of—the Cas9/gRNA complex. As type II CRISPR systems were adapted for use in gene editing, it was discovered that the crRNA and tracrRNA could be joined into a single unimolecular or chimeric guide RNA, in one non-limiting example, by means of a four nucleotide (e.g. GAAA) “tetraloop” or “linker” sequence bridging complementary regions of the crRNA (at its 3′ end) and the tracrRNA (at its 5′ end). (Mali 2013; Jiang 2013; Jinek 2012; all incorporated by reference herein).

[0220] Guide RNAs, whether unimolecular or modular, include a “targeting domain” that is fully or partially complementary to a target domain within a target sequence, such as a DNA sequence in the genome of a cell where editing is desired. Targeting domains are referred to by various names in the literature, including without limitation “guide sequences” (Hsu 2013, incorporated by reference herein), “complementarity regions” (Cotta-Ramusino), “spacers” (Briner 2014) and generically as “crRNAs” (Jiang). Irrespective of the names they are given, targeting domains are typically 10-30 nucleotides in length, and in certain embodiments are 16-24 nucleotides in length (for instance, 16, 17, 18, 19, 20, 21, 22, 23 or 24 nucleotides in length), and are at or near the 5′ terminus of in the case of a Cas9 gRNA, and at or near the 3′ terminus in the case of a Cpf1 gRNA.

[0221] In addition to the targeting domains, gRNAs typically (but not necessarily, as discussed below) include a plurality of domains that may influence the formation or activity of gRNA/Cas9 complexes. For instance, as mentioned above, the duplexed structure formed by first and secondary complementarity domains of a gRNA (also referred to as a repeat: anti-repeat duplex) interacts with the recognition (REC) lobe of Cas9 and can mediate the formation of Cas9/gRNA complexes (Nishimasu 2014; Nishimasu 2015; both incorporated by reference herein). It should be noted that the first and/or second complementarity domains may contain one or more poly-A tracts, which can be recognized by RNA polymerases as a termination signal. The sequence of the first and second complementarity domains are, therefore, optionally modified to eliminate these tracts and promote the complete in vitro transcription of gRNAs, for instance through the use of A-G swaps as described in Briner 2014, or A-U swaps. These and other similar modifications to the first and second complementarity domains are within the scope of the present disclosure.

[0222] Along with the first and second complementarity domains, Cas9 gRNAs typically include two or more additional duplexed regions that are involved in nuclease activity in vivo but not necessarily in vitro. (Nishimasu 2015). A first stem-loop one near the 3′ portion of the second complementarity domain is referred to variously as the “proximal domain,” (Cotta-Ramusino) “stem loop 1” (Nishimasu 2014 and 2015) and the “nexus” (Briner 2014). One or more additional stem loop structures are generally present near the 3′ end of the gRNA, with the number varying by species: S. pyogenes gRNAs typically include two 3′ stem loops (for a total of four stem loop structures including the repeat: anti-repeat duplex), while S. aureus and other species have only one (for a total of three stem loop structures). A description of conserved stem loop structures (and gRNA structures more generally) organized by species is provided in Briner 2014.

[0223] While the foregoing description has focused on gRNAs for use with Cas9, it should be appreciated that other RNA-guided nucleases exist which utilize gRNAs that differ in some ways from those described to this point. For instance, Cpf1 (“CRISPR from Prevotella and Franciscella 1”) is a recently discovered RNA-guided nuclease that does not require a tracrRNA to function. (Zetsche 2015, incorporated by reference herein). A gRNA for use in a Cpf1 genome editing system generally includes a targeting domain and a complementarity domain (alternately referred to as a “handle”). It should also be noted that, in gRNAs for use with Cpf1, the targeting domain is usually present at or near the 3′ end, rather than the 5′ end as described above in connection with Cas9 gRNAs (the handle is at or near the 5′ end of a Cpf1 gRNA). Exemplary targeting domains of Cpf1 gRNAs are set forth in Table 13 and Table 18.

[0224] Those of skill in the art will appreciate, however, that although structural differences may exist between gRNAs from different prokaryotic species, or between Cpf1 and Cas9 gRNAs, the principles by which gRNAs operate are generally consistent. Because of this consistency of operation, gRNAs can be defined, in broad terms, by their targeting domain sequences, and skilled artisans will appreciate that a given targeting domain sequence can be incorporated in any suitable gRNA, including a unimolecular or chimeric gRNA, or a gRNA that includes one or more chemical modifications and/or sequential modifications (substitutions, additional nucleotides, truncations, etc.). Thus, for economy of presentation in this disclosure, gRNAs may be described solely in terms of their targeting domain sequences.

[0225] More generally, skilled artisans will appreciate that some aspects of the present disclosure relate to systems, methods and compositions that can be implemented using multiple RNA-guided nucleases. For this reason, unless otherwise specified, the term gRNA should be understood to encompass any suitable gRNA that can be used with any RNA-guided nuclease, and not only those gRNAs that are compatible with a particular species of Cas9 or Cpf1. By way of illustration, the term gRNA can, in certain embodiments, include a gRNA for use with any RNA-guided nuclease occurring in a Class 2 CRISPR system, such as a type II or type V or CRISPR system, or an RNA-guided nuclease derived or adapted therefrom.

gRNA Design

[0226] Methods for selection and validation of target sequences as well as off-target analyses have been described previously (see, e.g., Mali 2013; Hsu 2013; Fu 2014; Heigwer 2014; Bae 2014; Xiao 2014). Each of these references is incorporated by reference herein. As a non-limiting example, gRNA design may involve the use of a software tool to optimize the choice of potential target sequences corresponding to a user's target sequence, e.g., to minimize total off-target activity across the genome. While off-target activity is not limited to cleavage, the cleavage efficiency at each off-target sequence can be predicted, e.g., using an experimentally-derived weighting scheme. These and other guide selection methods are described in detail in Maeder and Cotta-Ramusino.

[0227] With respect to selection of gRNA targeting domain sequences directed to HBG1/2 target sites (e.g. the 13 nt target region), an in-silico gRNA target domain identification tool was utilized, and the hits were stratified into four tiers. For S. pyogenes, tier 1 targeting domains were selected based on (1) distance upstream or downstream from either end of the target site (i.e., HBG1/2 13 nt target region), specifically within 400 bp of either end of the target site, (2) a high level of orthogonality, and (3) the presence of 5′ G. Tier 2 targeting domains were selected based on (1) distance upstream or downstream from either end of the target site (i.e., HBG1/2 13 nt target region), specifically within 400 bp of either end of the target site, and (2) a high level of orthogonality. Tier 3 targeting domains were selected based on (1) distance upstream or downstream from either end of the target site (i.e., HBG1/2 13 nt target region), specifically within 400 bp of either end of the target site and (2) the presence of 5′ G. Tier 4 targeting domains were selected based on distance upstream or downstream from either end of the target site (i.e., HBG1/2 13 nt target region), specifically within 400 bp of either end of the target site.

[0228] For S. aureus, tier 1 targeting domains were selected based on (1) distance upstream or downstream from either end of the target site (i.e., HBG1/2 13 nt target region), specifically within 400 bp of either end of the target site, (2) a high level of orthogonality, (3) the presence of 5′ G, and (4) PAM having the sequence NNGRRT (SEQ ID NO:204). Tier 2 targeting domains were selected based on (1) distance upstream or downstream from either end of the target site (i.e., HBG1/2 13 nt target), specifically within 400 bp of either end of the target site, (2) a high level of orthogonality, and (3) PAM having the sequence NNGRRT (SEQ ID NO:204). Tier 3 targeting domains were selected based on (1) distance upstream or downstream from either end of the target site (i.e., HBG1/2 13 nt target region), specifically within 400 bp of either end of the target site, and (2) PAM having the sequence NNGRRT (SEQ ID NO: 204). Tier 4 targeting domains were selected based on (1) distance upstream or downstream from either end of the target site (i.e., HBG1/2 13 nt target), specifically within 400 bp of either end of the target site, and (2) PAM having the sequence NNGRRV (SEQ ID NO:205).

[0229] Table 2, below, presents targeting domains for S. pyogenes and S. aureus gRNAs, broken out by (a) tier (1, 2, 3 or 4) and (b) HBG1 or HBG2.

TABLE 2
gRNA targeting domain sequences for HBG1/2 target sites

| | HBG1 | HBG2 |
|---|---|---|
| | S. pyogenes | |
| Tier 1 | 251-256 | 760-764 |
| Tier 2 | 257-274 | 765-781 |
| Tier 3 | 275-300 | 275-281, 283-300 |
| Tier 4 | 301-366 | 301-311, 313-342, 344-348, |
| | | 350-366, 782, 783 |
| | S. aureus | |
| Tier 1 | 367-376 | 784-791 |
| Tier 2 | 343, 377-393 | 778, 792-803 |
| Tier 3 | 357, 365, 394-461 | 357, 365, 394-461 |
| Tier 4 | 252-254, 256, 268, | 292, 295, 347, 348, 353, 360- |
| | 272-274, 292, 295, | 362, 366, 462-468 476-481, |
| | 347, 348, 353, 360- | 489-587, 601-607, 614-620, |
| | 362, 366, 598-759 | 640-666, 674-679, 687-693, |
| | | 708-714, 733-753, 762-764, |
| | | 775, 779-781, 804-901 |

[0230] Additional gRNA sequences that were designed to target alteration of the CCAAT box target region include, but are not limited to, the sequences set forth in SEQ ID NOs: 970 and 971. Targeting domain sequences of gRNAs that were designed to target disruption of the CCAAT box target region include, but are not limited to, SEQ ID NO:1002. Targeting domain sequences plus PAM (UUUG) of gRNAs that were designed to target disruption of the CCAAT box target region include, but are not limited to, SEQ ID NO:1004. In certain embodiments, gRNAs comprising the sequence set forth in SEQ ID NOs: 1002 and/or 1004 may be complexed with a Cpf1 protein or modified Cpf1 protein to generate alterations at the CCAAT box target region. In certain embodiments, gRNAs comprising any of the Cpf1 gRNAs set forth in Table 15, Table 18, or Table 19 may be complexed with a Cpf1 protein or modified Cpf1 protein forming an RNP (“gRNA-Cpf1-RNP”) to generate alterations at the CCAAT box target region. In certain embodiments, the modified Cpf1 protein may be His-AsCpf1-nNLS (SEQ ID NO: 1000) or His-AsCpf1-sNLS-sNLS (SEQ ID NO:1001). In certain embodiments, the Cpf1 molecule of the gRNA-Cpf1-RNP may be encoded by a sequence set forth in SEQ ID NOs: 1000, 1001, 1008-1018, 1032, 1035-39 (Cpf1 polypeptide sequences) or SEQ ID NOs: 1019-1021 (Cpf1 polynucleotide sequences).

[0231] gRNAs may be designed to target the erythroid specific enhancer of BCL11A (BCL11Ae) to disrupt expression of a transcriptional repressor, BCL11A (described in Friedland, which is incorporated by reference herein). gRNAs were designed to target the GATA1 binding motif that is in the erythroid specific enhancer of BCL11A that is in the +58 DHS region of intron 2 (i.e., the GATA1 binding motif in BCL11Ae), where the +58 DHS enhancer region comprises the sequence set forth in SEQ ID NO:968. Targeting domain sequences of gRNAs that were designed to target disruption of the GATA1 binding motif in BCL11Ae, include, but are not limited to, the sequences set forth in SEQ ID NOs: 952-955. Targeting domain sequences plus PAM (0) of gRNAs that were designed to target disruption of the GATA1 binding motif in BCL11Ae, include, but are not limited to, the sequences set forth in SEQ ID NOs: 960-963.

gRNA Modifications

[0232] The activity, stability, or other characteristics of gRNAs can be altered through the incorporation of certain modifications. As one example, transiently expressed or delivered nucleic acids can be prone to degradation by, e.g., cellular nucleases. Accordingly, the gRNAs described herein can contain one or more modified nucleosides or nucleotides which introduce stability toward nucleases. While not wishing to be bound by theory it is also believed that certain modified gRNAs described herein can exhibit a reduced innate immune response when introduced into cells. Those of skill in the art will be aware of certain cellular responses commonly observed in cells, e.g., mammalian cells, in response to exogenous nucleic acids, particularly those of viral or bacterial origin. Such responses, which can include induction of cytokine expression and release and cell death, may be reduced or eliminated altogether by the modifications presented herein.

[0233] Certain exemplary modifications discussed in this section can be included at any position within a gRNA sequence including, without limitation at or near the 5′ end (e.g., within 1-10, 1-5, or 1-2 nucleotides of the 5′ end) and/or at or near the 3′ end (e.g., within 1-10, 1-5, or 1-2 nucleotides of the 3′ end). In some cases, modifications are positioned within functional motifs, such as the repeat-anti-repeat duplex of a Cas9 gRNA, a stem loop structure of a Cas9 or Cpf1 gRNA, and/or a targeting domain of a gRNA.

[0234] As one example, the 5′ end of a gRNA can include a eukaryotic mRNA cap structure or cap analog (e.g., a G(5′)ppp(5′)G cap analog, a m7G(5′)ppp(5′)G cap analog, or a 3′-O-Me-m7G(5′)ppp(5′)G anti reverse cap analog (ARCA)), as shown below:

[chemical structure]

The cap or cap analog can be included during either chemical synthesis or in vitro transcription of the gRNA.

[0235] Along similar lines, the 5′ end of the gRNA can lack a 5′ triphosphate group. For instance, in vitro transcribed gRNAs can be phosphatase-treated (e.g., using calf intestinal alkaline phosphatase) to remove a 5′ triphosphate group.

[0236] Another common modification involves the addition, at the 3′ end of a gRNA, of a plurality (e.g., 1-10, 10-20, or 25-200) of adenine (A) residues referred to as a polyA tract. The polyA tract can be added to a gRNA during chemical synthesis, following in vitro transcription using a polyadenosine polymerase (e.g., E. coli Poly(A) Polymerase), or in vivo by means of a polyadenylation sequence, as described in Maeder.

[0237] It should be noted that the modifications described herein can be combined in any suitable manner, e.g. a gRNA, whether transcribed in vivo from a DNA vector, or in vitro transcribed gRNA, can include either or both of a 5′ cap structure or cap analog and a 3′ polyA tract.

[0238] Guide RNAs can be modified at a 3′ terminal U ribose. For example, the two terminal hydroxyl groups of the U ribose can be oxidized to aldehyde groups and a concomitant opening of the ribose ring to afford a modified nucleoside as shown below:

[chemical structure]

wherein “U” can be an unmodified or modified uridine.

[0239] The 3′ terminal U ribose can be modified with a 2′3′ cyclic phosphate as shown below:

[chemical structure]

wherein “U” can be an unmodified or modified uridine.

[0240] Guide RNAs can contain 3′ nucleotides which can be stabilized against degradation, e.g., by incorporating one or more of the modified nucleotides described herein. In certain embodiments, uridines can be replaced with modified uridines, e.g., 5-(2-amino) propyl uridine, and 5-bromo uridine, or with any of the modified uridines described herein; adenosines and guanosines can be replaced with modified adenosines and guanosines, e.g., with modifications at the 8-position, e.g., 8-bromo guanosine, or with any of the modified adenosines or guanosines described herein.

[0241] In certain embodiments, sugar-modified ribonucleotides can be incorporated into the gRNA, e.g., wherein the 2′ OH-group is replaced by a group selected from H, —OR, —R (wherein R can be, e.g., alkyl, cycloalkyl, aryl, aralkyl, heteroaryl or sugar), halo, —SH, —SR (wherein R can be, e.g., alkyl, cycloalkyl, aryl, aralkyl, heteroaryl or sugar), amino (wherein amino can be, e.g., NH₂; alkylamino, dialkylamino, heterocyclyl, arylamino, diarylamino, heteroarylamino, diheteroarylamino, or amino acid); or cyano (—CN). In certain embodiments, the phosphate backbone can be modified as described herein, e.g., with a phosphorothioate (PhTx) group. In certain embodiments, one or more of the nucleotides of the gRNA can each independently be a modified or unmodified nucleotide including, but not limited to 2′-sugar modified, such as, 2′-O-methyl, 2′-O-methoxyethyl, or 2′-Fluoro modified including, e.g., 2′-F or 2′-O-methyl, adenosine (A), 2′-F or 2′-O-methyl, cytidine (C), 2′-F or 2′-O-methyl, uridine (U), 2′-F or 2′-O-methyl, thymidine (T), 2′-F or 2′-O-methyl, guanosine (G), 2′-O-methoxyethyl-5-methyluridine (Teo), 2′-O-methoxyethyladenosine (Aeo), 2′-O-methoxyethyl-5-methylcytidine (m5Ceo), and any combinations thereof.

[0242] Guide RNAs can also include “locked” nucleic acids (LNA) in which the 2′ OH-group can be connected, e.g., by a C1-6 alkylene or C1-6 heteroalkylene bridge, to the 4′ carbon of the same ribose sugar. Any suitable moiety can be used to provide such bridges, include without limitation methylene, propylene, ether, or amino bridges; O-amino (wherein amino can be, e.g., NH₂; alkylamino, dialkylamino, heterocyclyl, arylamino, diarylamino, heteroarylamino, or diheteroarylamino, ethylenediamine, or polyamino) and aminoalkoxy or O(CH₂)ₙ-amino (wherein amino can be, e.g., NH₂; alkylamino, dialkylamino, heterocyclyl, arylamino, diarylamino, heteroarylamino, or diheteroarylamino, ethylenediamine, or polyamino).

[0243] In certain embodiments, a gRNA can include a modified nucleotide which is multicyclic (e.g., tricyclo; and “unlocked” forms, such as glycol nucleic acid (GNA) (e.g., R-GNA or S-GNA, where ribose is replaced by glycol units attached to phosphodiester bonds), or threose nucleic acid (TNA, where ribose is replaced with α-L-threofuranosyl-(3′→2′).

[0244] Generally, gRNAs include the sugar group ribose, which is a 5-membered ring having an oxygen. Exemplary modified gRNAs can include, without limitation, replacement of the oxygen in ribose (e.g., with sulfur(S), selenium (Se), or alkylene, such as, e.g., methylene or ethylene); addition of a double bond (e.g., to replace ribose with cyclopentenyl or cyclohexenyl); ring contraction of ribose (e.g., to form a 4-membered ring of cyclobutane or oxetane); ring expansion of ribose (e.g., to form a 6- or 7-membered ring having an additional carbon or heteroatom, such as for example, anhydrohexitol, altritol, mannitol, cyclohexanyl, cyclohexenyl, and morpholino that also has a phosphoramidate backbone). Although the majority of sugar analog alterations are localized to the 2′ position, other sites are amenable to modification, including the 4′ position. In certain embodiments, a gRNA comprises a 4′-S, 4′-Se or a 4′-C-aminomethyl-2′-O-Me modification.

[0245] In certain embodiments, deaza nucleotides, e.g., 7-deaza-adenosine, can be incorporated into the gRNA. In certain embodiments, O- and N-alkylated nucleotides, e.g., N6-methyl adenosine, can be incorporated into the gRNA. In certain embodiments, one or more or all of the nucleotides in a gRNA are deoxynucleotides.

[0246] In certain embodiments, gRNAs as used herein may be modified or unmodified gRNAs. In certain embodiments, a gRNA may include one or more modifications. In certain embodiments, the one or more modifications may include a phosphorothioate linkage modification, a phosphorodithioate (PS2) linkage modification, a 2′-O-methyl modification, or combinations thereof. In certain embodiments, the one or more modifications may be at the 5′ end of the gRNA, at the 3′ end of the gRNA, or combinations thereof.

[0247] In certain embodiments, a gRNA modification may comprise one or more phosphorodithioate (PS2) linkage modifications.

[0248] In some embodiments, a gRNA used herein includes one or more or a stretch of deoxyribonucleic acid (DNA) bases, also referred to herein as a “DNA extension.” In some embodiments, a gRNA used herein includes a DNA extension at the 5′ end of the gRNA, the 3′ end of the gRNA, or a combination thereof. In certain embodiments, the DNA extension may be 1, 2, 3, 4, 5, 6, 7, 8, 9, 10, 11, 12, 13, 14, 15, 16, 17, 18, 19, 20, 21, 22, 23, 24, 25, 26, 27, 28, 29, 30, 31, 32, 33, 34, 35, 36, 37, 38, 39, 40, 41, 42, 43, 44, 45, 46, 47, 48, 49, 50, 51, 52, 53, 54, 55, 56, 57, 58, 59, 60, 61, 62, 63, 64, 65, 66, 67, 68, 69, 70, 71, 72, 73, 74, 75, 76, 77, 78, 79, 80, 81, 82, 83, 84, 85, 86, 87, 88, 89, 90, 91, 92, 93, 94, 95, 96, 97, 98, 99, or 100 DNA bases long. For example, in certain embodiments, the DNA extension may be 1, 2, 3, 4, 5, 10, 15, 20, or 25 DNA bases long. In certain embodiments, the DNA extension may include one or more DNA bases selected from adenine (A), guanine (G), cytosine (C), or thymine (T). In certain embodiments, the DNA extension includes the same DNA bases. For example, the DNA extension may include a stretch of adenine (A) bases. In certain embodiments, the DNA extension may include a stretch of thymine (T) bases. In certain embodiments, the DNA extension includes a combination of different DNA bases. In certain embodiments, a DNA extension may comprise a sequence set forth in Table 24. For example, a DNA extension may comprise a sequence set forth in SEQ ID NOs: 1235-1250. In certain embodiments, a gRNA used herein includes a DNA extension as well as one or more phosphorothioate linkage modifications, one or more phosphorodithioate (PS2) linkage modifications, one or more 2′-O-methyl modifications, or combinations thereof. In certain embodiments, the one or more modifications may be at the 5′ end of the gRNA, at the 3′ end of the gRNA, or combinations thereof. In certain embodiments, a gRNA including a DNA extension may comprise a sequence set forth in Table 19 that includes a DNA extension. In a particular embodiment, a gRNA including a DNA extension may comprise the sequence set forth in SEQ ID NO:1051. In certain embodiments, a gRNA including a DNA extension may comprise a sequence selected from the group consisting of SEQ ID NOs: 1046-1060, 1067, 1068, 1074, 1075, 1078, 1081-1084, 1086-1087, 1089-1090, 1092-1093, 1098-1102, and 1106. Without wishing to be bound by theory, it is contemplated that any DNA extension may be used herein, so long as it does not hybridize to the target nucleic acid being targeted by the gRNA and it also exhibits an increase in editing at the target nucleic acid site relative to a gRNA which does not include such a DNA extension.

[0249] In some embodiments, a gRNA used herein includes one or more or a stretch of ribonucleic acid (RNA) bases, also referred to herein as an “RNA extension.” In some embodiments, a gRNA used herein includes an RNA extension at the 5′ end of the gRNA, the 3′ end of the gRNA, or a combination thereof. In certain embodiments, the RNA extension may be 1, 2, 3, 4, 5, 6, 7, 8, 9, 10, 11, 12, 13, 14, 15, 16, 17, 18, 19, 20, 21, 22, 23, 24, 25, 26, 27, 28, 29, 30, 31, 32, 33, 34, 35, 36, 37, 38, 39, 40, 41, 42, 43, 44, 45, 46, 47, 48, 49, 50, 51, 52, 53, 54, 55, 56, 57, 58, 59, 60, 61, 62, 63, 64, 65, 66, 67, 68, 69, 70, 71, 72, 73, 74, 75, 76, 77, 78, 79, 80, 81, 82, 83, 84, 85, 86, 87, 88, 89, 90, 91, 92, 93, 94, 95, 96, 97, 98, 99, or 100 RNA bases long. For example, in certain embodiments, the RNA extension may be 1, 2, 3, 4, 5, 10, 15, 20, or 25 RNA bases long. In certain embodiments, the RNA extension may include one or more RNA bases selected from adenine (rA), guanine (rG), cytosine (rC), or uracil (rU), in which the “r” represents RNA, 2′-hydroxy. In certain embodiments, the RNA extension includes the same RNA bases. For example, the RNA extension may include a stretch of adenine (rA) bases. In certain embodiments, the RNA extension includes a combination of different RNA bases. In certain embodiments, an RNA extension may comprise a sequence set forth in Table 24. For example, an RNA extension may comprise a sequence set forth in 1231-1234, 1251-1253. In certain embodiments, a gRNA used herein includes an RNA extension as well as one or more phosphorothioate linkage modifications, one or more phosphorodithioate (PS2) linkage modifications, one or more 2′-O-methyl modifications, or combinations thereof. In certain embodiments, the one or more modifications may be at the 5′ end of the gRNA, at the 3′ end of the gRNA, or combinations thereof. In certain embodiments, a gRNA including a RNA extension may comprise a sequence set forth in Table 19 that includes an RNA extension. gRNAs including an RNA extension at the 5′ end of the gRNA may comprise a sequence selected from the group consisting of SEQ ID NOs: 1042-1045, 1103-1105. gRNAs including an RNA extension at the 3′ end of the gRNA may comprise a sequence selected from the group consisting of SEQ ID NOs: 1070-1075, 1079, 1081, 1098-1100.

[0250] It is contemplated that gRNAs used herein may also include an RNA extension and a DNA extension. In certain embodiments, the RNA extension and DNA extension may both be at the 5′ end of the gRNA, the 3′ end of the gRNA, or a combination thereof. In certain embodiments, the RNA extension is at the 5′ end of the gRNA and the DNA extension is at the 3′ end of the gRNA. In certain embodiments, the RNA extension is at the 3′ end of the gRNA and the DNA extension is at the 5′ end of the gRNA.

[0251] In some embodiments, a gRNA which includes both a phosphorothioate modification at the 3′ end as well as a DNA extension at the 5′ end is complexed with a RNA-guided nuclease, e.g., Cpf1, to form an RNP, which is then employed to edit a hematopoietic stem cell (HSC) or a CD34+ cell ex vivo (i.e., outside the body of a subject from whom such a cell is derived), at the HBG locus.

[0252] An example of a gRNA as used herein comprises the sequence set forth in SEQ ID NO: 1051.

Dead gRNA Molecules

[0253] Dead guide RNA (dgRNA) molecules according to the present disclosure include dead guide RNA molecules that comprise reduced, low, or undetectable cleavage activity. The targeting domain sequences of dead guide RNAs are shorter in length by 1, 2, 3, 4, 5, 6, 7, 8, 9, or 10 nucleotides compared to the targeting domain sequence of active guide RNAs. In certain embodiments, dead guide RNA molecules may comprise a targeting domain comprising 15 nucleotides or fewer in length, 14 nucleotides or fewer in length, 13 nucleotides or fewer in length, 12 nucleotides or fewer in length, or 11 nucleotides or fewer in length. In some embodiments, dead guide RNAs are configured such that they do not provide an RNA guided-nuclease cleavage event. Dead guide RNAs may be generated by removing the 5′ end of a gRNA targeting domain sequence, which results in a truncated targeting domain sequence. For example, if a gRNA sequence, configured to provide a cleavage event (i.e., 17 nucleotides or more in length), has a targeting domain sequence that is 20 nucleotides in length, a dead guide RNA may be created by removing 5 nucleotides from the 5′ end of the gRNA sequence. For example, dgRNAs used herein may comprise a targeting domain set forth in Table 2 or Table 10 that has been truncated from the 5′ end of the gRNA sequence and comprises 15 nucleotides or fewer in length. In certain embodiments, the dgRNA may be configured to bind (or associate with) a nucleic acid sequence within or proximal to a target region (e.g., the CCAAT box target region, 13 nt target region, proximal HBG1/2 promoter target sequence, and/or the GATA1 binding motif in BCL11Ae) to be edited. For example, any of the dgRNAs set forth in Table 10 may be employed to bind a nucleic acid sequence proximal to the 13 nt target region or CCAAT box target region. In certain embodiments, proximal to may denote the region within 10, 25, 50, 100, or 200 nucleotides of a target region (e.g., the CCAAT box target region, 13 nt target region, proximal HBG1/2 promoter target sequence, and/or the GATA1 binding motif in BCL11Ae). In certain embodiments, the dead guide RNA is not configured to recruit an exogenous trans-acting factor to a target region. In certain embodiments, the dgRNA is configured such that it does not provide a DNA cleavage event when complexed with an RNA-guided nuclease. Skilled artisans will appreciate that dead guide RNA molecules may be designed to comprise targeting domains complementary to regions proximal to or within a target region in a target nucleic acid. In certain embodiments, dead guide RNAs comprise targeting domain sequences that are complementary to the transcription strand or non-transcription strand of double stranded DNA. The dgRNAs herein may include modifications at the 5′ and 3′ end of the dgRNA as described for guide RNAs in the section “gRNA modifications” herein. For example, in certain embodiments, dead guide RNAs may include an anti-reverse cap analog (ARCA) at the 5′ end of the RNA. In certain embodiments, dgRNAs may include a polyA tail at the 3′ end.

[0254] In certain embodiments, the use of a dead guide RNA with the genome editing systems and methods disclosed herein may increase the total editing level of an active guide RNA. In certain embodiments, the use of a dead guide RNA with the genome editing systems disclosed herein and methods thereof may increase the frequency of deletions. In certain embodiments, the deletions may extend from the cut site of the active guide RNA toward the dead guide RNA binding site. In this way the dead guide RNA can change the directionality of an active guide RNA and orient editing toward a desired target region.

[0255] As used herein, the terms “dead gRNA” and “truncated gRNA” are used interchangeably.

### RNA-Guided Nucleases

[0256] RNA-guided nucleases according to the present disclosure include, but are not limited to, naturally-occurring Class 2 CRISPR nucleases such as Cas9, and Cpf1, as well as other nucleases derived or obtained therefrom. It has also been shown that certain RNA-guided nucleases, such as Cas9, also have helicase activity that enables them to unwind nucleic acid. In certain embodiments, the RNA-guided helicases according to the present disclosure may be any of the RNA-nucleases described herein and supra in the section entitled “RNA-guided nucleases.” In certain embodiments, the RNA-guided nuclease is not configured to recruit an exogenous trans-acting factor to a target region. In certain embodiments, an RNA-guided helicase may be an RNA-guided nuclease configured to lack nuclease activity. For example, in certain embodiments, an RNA-guided helicase may be a catalytically inactive RNA-guided nuclease that lacks nuclease activity, but still retains its helicase activity. In certain embodiments, an RNA-guided nuclease may be mutated to abolish its nuclease activity (e.g., dead Cas9), creating a catalytically inactive RNA-guided nuclease that is unable to cleave nucleic acid, but which can still unwind DNA. In certain embodiments, an RNA-guided helicase may be complexed with any of the dead guide RNAs as described herein. For example, a catalytically active RNA-guided helicase (e.g., Cas9 or Cpf1) may form an RNP complex with a dead guide RNA, resulting in a catalytically inactive dead RNP (dRNP). In certain embodiments, a catalytically inactive RNA-guided helicase (e.g., dead Cas9) and a dead guide RNA may form a dRNP. These dRNPs, although incapable of providing a cleavage event, still retain their helicase activity that is important for unwinding nucleic acid.

[0257] In functional terms, RNA-guided nucleases are defined as those nucleases that: (a) interact with (e.g. complex with) a gRNA; and (b) together with the gRNA, associate with, and optionally cleave or modify, a target region of a DNA that includes (i) a sequence complementary to the targeting domain of the gRNA and, optionally, (ii) an additional sequence referred to as a “protospacer adjacent motif,” or “PAM,” which is described in greater detail below. As the following examples will illustrate, RNA-guided nucleases can be defined, in broad terms, by their PAM specificity and cleavage activity, even though variations may exist between individual RNA-guided nucleases that share the same PAM specificity or cleavage activity. Skilled artisans will appreciate that some aspects of the present disclosure relate to systems, methods and compositions that can be implemented using any suitable RNA-guided nuclease having a certain PAM specificity and/or cleavage activity. For this reason, unless otherwise specified, the term RNA-guided nuclease should be understood as a generic term, and not limited to any particular type (e.g. Cas9 vs. Cpf1), species (e.g. S. pyogenes vs. S. aureus) or variation (e.g. full-length vs. truncated or split; naturally-occurring PAM specificity vs. engineered PAM specificity, etc.) of RNA-guided nuclease.

[0258] Various RNA-guided nucleases may require different sequential relationships between PAMs and protospacers. In general, Cas9s recognize PAM sequences that are 3′ of the protospacer. Cpf1, on the other hand, generally recognizes PAM sequences that are 5′ of the protospacer.

[0259] In addition to recognizing specific sequential orientations of PAMs and protospacers, RNA-guided nucleases can also recognize specific PAM sequences. S. aureus Cas9, for instance, recognizes a PAM sequence of NNGRRT or NNGRRV, wherein the N residues are immediately 3′ of the region recognized by the gRNA targeting domain. S. pyogenes Cas9 recognizes NGG PAM sequences. And F. novicida Cpf1 recognizes a TTN PAM sequence. PAM sequences have been identified for a variety of RNA-guided nucleases, and a strategy for identifying novel PAM sequences has been described by Shmakov 2015. It should also be noted that engineered RNA-guided nucleases can have PAM specificities that differ from the PAM specificities of reference molecules (for instance, in the case of an engineered RNA-guided nuclease, the reference molecule may be the naturally occurring variant from which the RNA-guided nuclease is derived, or the naturally occurring variant having the greatest amino acid sequence homology to the engineered RNA-guided nuclease). Examples of PAMs that may be used according to the embodiments herein include, without limitation, the sequences set forth in SEQ ID NOs: 199-205.

[0260] In addition to their PAM specificity, RNA-guided nucleases can be characterized by their DNA cleavage activity: naturally-occurring RNA-guided nucleases typically form DSBs in target nucleic acids, but engineered variants have been produced that generate only SSBs (discussed above and in Ran & Hsu 2013, incorporated by reference herein), or that do not cut at all.

### Cas9

[0261] Crystal structures have been determined for S. pyogenes Cas9 (Jinek 2014), and for S. aureus Cas9 in complex with a unimolecular guide RNA and a target DNA (Nishimasu 2014; Anders 2014; and Nishimasu 2015).

[0262] A naturally occurring Cas9 protein comprises two lobes: a recognition (REC) lobe and a nuclease (NUC) lobe; each of which comprise particular structural and/or functional domains. The REC lobe comprises an arginine-rich bridge helix (BH) domain, and at least one REC domain (e.g. a REC1 domain and, optionally, a REC2 domain). The REC lobe does not share structural similarity with other known proteins, indicating that it is a unique functional domain. While not wishing to be bound by any theory, mutational analyses suggest specific functional roles for the BH and REC domains: the BH domain appears to play a role in gRNA: DNA recognition, while the REC domain is thought to interact with the repeat: anti-repeat duplex of the gRNA and to mediate the formation of the Cas9/gRNA complex.

[0263] The NUC lobe comprises a RuvC domain, an HNH domain, and a PAM-interacting (PI) domain. The RuvC domain shares structural similarity to retroviral integrase superfamily members and cleaves the non-complementary (i.e. bottom) strand of the target nucleic acid. It may be formed from two or more split RuvC motifs (such as RuvC I, RuvCII, and RuvCIII in S. pyogenes and S. aureus). The HNH domain, meanwhile, is structurally similar to HNN endonuclease motifs, and cleaves the complementary (i.e. top) strand of the target nucleic acid. The PI domain, as its name suggests, contributes to PAM specificity. Examples of polypeptide sequences encoding Cas9 RuvC-like and Cas9 HNH-like domains that may be used according to the embodiments herein are set forth in SEQ ID NOs: 15-23, 52-123 (RuvC-like domains) and SEQ ID NOs: 24-28, 124-198 (HNH-like domains).

[0264] While certain functions of Cas9 are linked to (but not necessarily fully determined by) the specific domains set forth above, these and other functions may be mediated or influenced by other Cas9 domains, or by multiple domains on either lobe. For instance, in S. pyogenes Cas9, as described in Nishimasu 2014, the repeat: antirepeat duplex of the gRNA falls into a groove between the REC and NUC lobes, and nucleotides in the duplex interact with amino acids in the BH, PI, and REC domains. Some nucleotides in the first stem loop structure also interact with amino acids in multiple domains (PI, BH and REC1), as do some nucleotides in the second and third stem loops (RuvC and PI domains). Examples of polypeptide sequences encoding Cas9 molecules that may be used according to the embodiments herein are set forth in SEQ ID NOs: 1-2, 4-6, 12, and 14.

### Cpf1

[0265] The crystal structure of Acidaminococcus sp. Cpf1 in complex with crRNA and a double-stranded (ds) DNA target including a TTTN PAM sequence has been solved by Yamano 2016 (incorporated by reference herein). Cpf1, like Cas9, has two lobes: a REC (recognition) lobe, and a NUC (nuclease) lobe. The REC lobe includes REC1 and REC2 domains, which lack similarity to any known protein structures. The NUC lobe, meanwhile, includes three RuvC domains (RuvC-I, -II and -III) and a BH domain. However, in contrast to Cas9, the Cpf1 REC lobe lacks an HNH domain, and includes other domains that also lack similarity to known protein structures: a structurally unique PI domain, three Wedge (WED) domains (WED-I, -II and -III), and a nuclease (Nuc) domain.

[0266] While Cas9 and Cpf1 share similarities in structure and function, it should be appreciated that certain Cpf1 activities are mediated by structural domains that are not analogous to any Cas9 domains. For instance, cleavage of the complementary strand of the target DNA appears to be mediated by the Nuc domain, which differs sequentially and spatially from the HNH domain of Cas9. Additionally, the non-targeting portion of Cpf1 gRNA (the handle) adopts a pseudoknot structure, rather than a stem loop structure formed by the repeat: antirepeat duplex in Cas9 gRNAs.

[0267] In certain embodiments, a Cpf1 protein may be a modified Cpf1 protein. In certain embodiments, a modified Cpf1 protein may include one or more modifications. In certain embodiments the modifications may be, without limitation, one or more mutations in a Cpf1 nucleotide sequence or Cpf1 amino acid sequence, one or more additional sequences such as a His tag or a nuclear localization signal (NLS), or a combination thereof. In certain embodiments, a modified Cpf1 may also be referred to herein as a Cpf1 variant.

[0268] In certain embodiments, the Cpf1 protein may be derived from a Cpf1 protein selected from the group consisting of Acidaminococcus sp. strain BV3L6 Cpf1 protein (AsCpf1), Lachnospiraceae bacterium ND2006 Cpf1 protein (LbCpf1), and Lachnospiraceae bacterium MA2020 (Lb2Cpf1). In certain embodiments, the Cpf1 protein may comprise a sequence selected from the group consisting of SEQ ID NOs. 1016-1018, having the codon-optimized nucleic acid sequences of SEQ ID NOs. 1019-1021, respectively.

[0269] In certain embodiments, the modified Cpf1 protein may comprise a nuclear localization signal (NLS). For example, but not by way of limitation, NLS sequences useful in connection with the methods and compositions disclosed herein will comprise an amino acid sequence capable of facilitating protein import into the cell nucleus. NLS sequences useful in connection with the methods and compositions disclosed herein are known in the art. Examples of such NLS sequences include the nucleoplasmin NLS having the amino acid sequence: KRPAATKKAGQAKKKK (SEQ ID NO. 1006) and the simian virus 40 “SV40” NLS having the amino acid sequence PKKKRKV (SEQ ID NO. 1007).

[0270] In certain embodiments, the NLS sequence of the modified Cpf1 protein is positioned at or near the C-terminus of the Cpf1 protein sequence. For example, but not by way of limitation, the modified Cpf1 protein can be selected from the following: His-AsCpf1-nNLS (SEQ ID NO. 1000); His-AsCpf1-SNLS (SEQ ID NO. 1008) and His-AsCpf1-sNLS-sNLS (SEQ ID NO. 1001), where “His” refers to a six-histidine purification sequence, “AsCpf1” refers to the Acidaminococcus sp. Cpf1 protein sequence, “nNLS” refers to the nucleoplasmin NLS, and “sNLS” refers to the SV40 NLS. Additional permutations of the identity and C-terminal positions of NLS sequences, e.g., appending two or more nNLS sequences or combinations of nNLS and sNLS sequences (or other NLS sequences), as well as sequences with and without purification sequences, e.g., six-histidine sequences, are within the scope of the instantly disclosed subject matter.

[0271] In certain embodiments, the NLS sequence of the modified Cpf1 protein may be positioned at or near the N-terminus of the Cpf1 protein sequence. For example, but not by way of limitation, the modified Cpf1 protein may be selected from the following: His-SNLS-AsCpf1 (SEQ ID NO. 1009), His-SNLS-SNLS-AsCpf1 (SEQ ID NO. 1010), and sNLS-sNLS-AsCpf1 (SEQ ID NO. 1011). Additional permutations of the identity and N-terminal positions of NLS sequences, e.g., appending two or more nNLS sequences or combinations of nNLS and sNLS sequences (or other NLS sequences), as well as sequences with and without purification sequences, e.g., six-histidine sequences, are within the scope of the instantly disclosed subject matter.

[0272] In certain embodiments, the modified Cpf1 protein may comprise NLS sequences positioned at or near both the N-terminus and C-terminus of the Cpf1 protein sequence. For example, but not by way of limitation, the modified Cpf1 protein may be selected from the following: His-sNLS-AsCpf1-SNLS (SEQ ID NO. 1012) and His-sNLS-sNLS-AsCpf1-sNLS-sNLS (SEQ ID NO. 1013). Additional permutations of the identity and N-terminal/C-terminal positions of NLS sequences, e.g., appending two or more nNLS sequences or combinations of nNLS and sNLS sequences (or other NLS sequences) to either the N-terminal/C-terminal positions, as well as sequences with and without purification sequences, e.g., six-histidine sequences, are within the scope of the instantly disclosed subject matter.

[0273] In certain embodiments, the modified Cpf1 protein may comprise an alteration (e.g., a deletion or substitution) at one or more cysteine residues of the Cpf1 protein sequence. For example, but not by way of limitation, modified Cpf1 protein may comprise an alteration at a position selected from the group consisting of: C65, C205, C334, C379, C608, C674, C1025, and C1248. In certain embodiments, the modified Cpf1 protein may comprise a substitution of one or more cysteine residues for a serine or alanine. In certain embodiments, the modified Cpf1 protein may comprise an alteration selected from the group consisting of: C65S, C205S, C334S, C379S, C608S, C674S, C1025S, and C1248S. In certain embodiments, the modified Cpf1 protein may comprise an alteration selected from the group consisting of: C65A, C205A, C334A, C379A, C608A, C674A, C1025A, and C1248A. In certain embodiments, the modified Cpf1 protein may comprise alterations at positions C334 and C674 or C334, C379, and C674. In certain embodiments, the modified Cpf1 protein may comprise the following alterations: C334S and C674S, or C334S, C379S, and C674S. In certain embodiments, the modified Cpf1 protein may comprise the following alterations: C334A and C674A, or C334A, C379A, and C674A. In certain embodiments, the modified Cpf1 protein may comprise both one or more cysteine residue alteration as well as the introduction of one or more NLS sequences, e.g., His-AsCpf1-nNLS Cys-less (SEQ ID NO. 1014) or His-AsCpf1-nNLS Cys-low (SEQ ID NO. 1015). In various embodiments, the Cpf1 protein comprising a deletion or substitution in one or more cysteine residues exhibits reduced aggregation.

[0274] In certain embodiments, other modified Cpf1 proteins known in the art may be used with the methods and systems described herein. For example, in certain embodiments, the modified Cpf1 may be Cpf1 containing the mutation S542R/K548V/N552R (“Cpf1 RVR”). Cpf1 RVR has been shown to cleave target sites with a TATV PAM. In certain embodiments, the modified Cpf1 may be Cpf1 containing the mutation S542R/K607R (“Cpf1 RR”). Cpf1 RR has been shown to cleave target sites with a TYCV/CCCC PAM.

[0275] In some embodiments, a Cpf1 variant is used herein, wherein the Cpf1 variant comprises mutations at one or more residues of AsCpf1 (Acidaminococcus sp. BV3L6) selected from the group consisting of 11, 12, 13, 14, 15, 16, 17, 34, 36, 39, 40, 43, 46, 47, 50, 54, 57, 58, 111, 126, 127, 128, 129, 130, 131, 132, 133, 134, 135, 136, 157, 158, 159, 160, 161, 162, 163, 164, 165, 166, 167, 168, 169, 170, 171, 172, 173, 174, 175, 176, 177, 178, 532, 533, 534, 535, 536, 537, 538, 539, 540, 541, 542, 543, 544, 545, 546, 547, 548, 549, 550, 551, 552, 553, 554, 555, 556, 565, 566, 567, 568, 569, 570, 571, 572, 573, 574, 575, 592, 593, 594, 595, 596, 597, 598, 599, 600, 601, 602, 603, 604, 605, 606, 607, 608, 609, 610, 611, 612, 613, 614, 615, 616, 617, 618, 619, 620, 626, 627, 628, 629, 630, 631, 632, 633, 634, 635, 636, 637, 638, 642, 643, 644, 645, 646, 647, 648, 649, 651, 652, 653, 654, 655, 656, 676, 679, 680, 682, 683, 684, 685, 686, 687, 688, 689, 690, 691, 692, 693, 707, 711, 714, 715, 716, 717, 718, 719, 720, 721, 722, 739, 765, 768, 769, 773, 777, 778, 779, 780, 781, 782, 783, 784, 785, 786, 870, 871, 872, 873, 874, 875, 876, 877, 878, 879, 880, 881, 882, 883, 884, or 1048 or the corresponding position of an AsCpf1 orthologue, homologue, or variant.

[0276] In certain embodiments, a Cpf1 variant as used herein may include any of the Cpf1 proteins described in International Publication Number WO 2017/184768 A1 by Zhang et al. (“'768 Publication”), which is incorporated by reference herein.

[0277] In certain embodiments, a modified Cpf1 protein (also referred to as a Cpf1 variant) used herein may be encoded by any of the sequences set forth in SEQ ID NOs: 1000, 1001, 1008-1018, 1032, 1035-39, 1094-1097, 1107-09 (Cpf1 polypeptide sequences) or SEQ ID NOs: 1019-1021, 1110-17 (Cpf1 polynucleotide sequences). Table 20 sets forth exemplary Cpf1 variant amino acid and nucleotide sequences. These sequences are set forth in FIG. 62, which details the positions of six-histidine sequences (underlined letters) and NLS sequences (bolded letters). Additional permutations of the identity and N-terminal/C-terminal positions of NLS sequences, e.g., appending two or more nNLS sequences or combinations of nNLS and sNLS sequences (or other NLS sequences) to either the N-terminal/C-terminal positions, as well as sequences with and without purification sequences, e.g., six-histidine sequences, are within the scope of the instantly disclosed subject matter.

[0278] In certain embodiments, any of the Cpf1 proteins or modified Cpf1 proteins disclosed herein may be complexed with one or more gRNA comprising the targeting domain set forth in SEQ ID NOs 1002 and/or 1004 to alter a CCAAT box target region. In certain embodiments, any of the Cpf1 proteins or modified Cpf1 proteins disclosed herein may be complexed with one or more gRNA comprising a sequence set forth in Table 18 or Table19. In certain embodiments, the modified Cpf1 protein may be His-AsCpf1-nNLS (SEQ ID NO: 1000) or His-AsCpf1-sNLS-sNLS (SEQ ID NO:1001). In certain embodiments, a modified Cpf1 protein used herein may be encoded by any of the sequences set forth in SEQ ID NOs: 1000, 1001, 1008-1018, 1032, 1035-39, 1094-1097, 1107-09 (Cpf1 polypeptide sequences) or SEQ ID NOs: 1019-1021, 1110-17 (Cpf1 polynucleotide sequences). In certain embodiments, the modified Cpf1 protein may comprise the sequence set forth in SEQ ID NO:1097.

### Modifications of RNA-Guided Nucleases

[0279] The RNA-guided nucleases described above have activities and properties that can be useful in a variety of applications, but the skilled artisan will appreciate that RNA-guided nucleases can also be modified in certain instances, to alter cleavage activity, PAM specificity, or other structural or functional features.

[0280] Turning first to modifications that alter cleavage activity, mutations that reduce or eliminate the activity of domains within the NUC lobe have been described above. Exemplary mutations that may be made in the RuvC domains, in the Cas9 HNH domain, or in the Cpf1 Nuc domain are described in Ran & Hsu 2013 and Yamano 2016, as well as in Cotta-Ramusino. In general, mutations that reduce or eliminate activity in one of the two nuclease domains result in RNA-guided nucleases with nickase activity, but it should be noted that the type of nickase activity varies depending on which domain is inactivated. As one example, inactivation of a RuvC domain of a Cas9 will result in a nickase that cleaves the complementary or top strand as shown below (where C denotes the site of cleavage).

[0281] On the other hand, inactivation of a Cas9 HNH domain results in a nickase that cleaves the bottom or non-complementary strand.

[0282] Modifications of PAM specificity relative to naturally occurring Cas9 reference molecules has been described by Kleinstiver et al. for both S. pyogenes (Kleinstiver 2015a) and S. aureus (Kleinstiver 2015b). Kleinstiver et al. have also described modifications that improve the targeting fidelity of Cas9 (Kleinstiver 2016). Each of these references is incorporated by reference herein.

[0283] RNA-guided nucleases have been split into two or more parts, as described by Zetsche 2015 and Fine 2015 (both incorporated by reference herein).

[0284] RNA-guided nucleases can be, in certain embodiments, size-optimized or truncated, for instance via one or more deletions that reduce the size of the nuclease while still retaining gRNA association, target and PAM recognition, and cleavage activities. In certain embodiments, RNA guided nucleases are bound, covalently or non-covalently, to another polypeptide, nucleotide, or other structure, optionally by means of a linker. Exemplary bound nucleases and linkers are described by Guilinger 2014, incorporated by reference herein for all purposes.

[0285] RNA-guided nucleases also optionally include a tag, such as, but not limited to, a nuclear localization signal to facilitate movement of RNA-guided nuclease protein into the nucleus. In certain embodiments, the RNA-guided nuclease can incorporate C- and/or N-terminal nuclear localization signals. Nuclear localization sequences are known in the art and are described in Maeder and elsewhere.

[0286] The foregoing list of modifications is intended to be exemplary in nature, and the skilled artisan will appreciate, in view of the instant disclosure, that other modifications may be possible or desirable in certain applications. For brevity, therefore, exemplary systems, methods and compositions of the present disclosure are presented with reference to particular RNA-guided nucleases, but it should be understood that the RNA-guided nucleases used may be modified in ways that do not alter their operating principles. Such modifications are within the scope of the present disclosure.

### Nucleic Acids Encoding RNA-Guided Nucleases

[0287] Nucleic acids encoding RNA-guided nucleases, e.g., Cas9, Cpf1 or functional fragments thereof, are provided herein. Examples of nucleic acid sequences encoding Cas9 molecules that may be used according to the embodiments herein are set forth in SEQ ID NOs: 3, 7-11, 13. Exemplary nucleic acids encoding RNA-guided nucleases have been described previously (see, e.g., Cong 2013; Wang 2013; Mali 2013; Jinek 2012).

[0288] In some cases, a nucleic acid encoding an RNA-guided nuclease can be a synthetic nucleic acid sequence. For example, the synthetic nucleic acid molecule can be chemically modified. In certain embodiments, an mRNA encoding an RNA-guided nuclease will have one or more (e.g., all) of the following properties: it can be capped; polyadenylated; and substituted with 5-methylcytidine and/or pseudouridine.

[0289] Synthetic nucleic acid sequences can also be codon optimized, e.g., at least one non-common codon or less-common codon has been replaced by a common codon. For example, the synthetic nucleic acid can direct the synthesis of an optimized messenger mRNA, e.g., optimized for expression in a mammalian expression system, e.g., described herein. Examples of codon optimized Cas9 coding sequences are presented in Cotta-Ramusino.

[0290] In addition, or alternatively, a nucleic acid encoding an RNA-guided nuclease may comprise a nuclear localization sequence (NLS). Nuclear localization sequences are known in the art.

### Functional Analysis of Candidate Molecules

[0291] Candidate RNA-guided nucleases, gRNAs, and complexes thereof, can be evaluated by standard methods known in the art. See, e.g. Cotta-Ramusino. The stability of RNP complexes may be evaluated by differential scanning fluorimetry, as described below.

### Differential Scanning Fluorimetry (DSF)

[0292] The thermostability of ribonucleoprotein (RNP) complexes comprising gRNAs and RNA-guided nucleases can be measured via DSF. The DSF technique measures the thermostability of a protein, which can increase under favorable conditions such as the addition of a binding RNA molecule, e.g., a gRNA.

[0293] A DSF assay can be performed according to any suitable protocol, and can be employed in any suitable setting, including without limitation (a) testing different conditions (e.g. different stoichiometric ratios of gRNA: RNA-guided nuclease protein, different buffer solutions, etc.) to identify optimal conditions for RNP formation; and (b) testing modifications (e.g. chemical modifications, alterations of sequence, etc.) of an RNA-guided nuclease and/or a gRNA to identify those modifications that improve RNP formation or stability. One readout of a DSF assay is a shift in melting temperature of the RNP complex; a relatively high shift suggests that the RNP complex is more stable (and may thus have greater activity or more favorable kinetics of formation, kinetics of degradation, or another functional characteristic) relative to a reference RNP complex characterized by a lower shift. When the DSF assay is deployed as a screening tool, a threshold melting temperature shift may be specified, so that the output is one or more RNPs having a melting temperature shift at or above the threshold. For instance, the threshold can be 5-10° C. (e.g. 5°, 6°, 7°, 8°, 9°,) 10° or more, and the output may be one or more RNPs characterized by a melting temperature shift greater than or equal to the threshold.

[0294] Two non-limiting examples of DSF assay conditions are set forth below:

[0295] To determine the best solution to form RNP complexes, a fixed concentration (e.g. 2 μM) of Cas9 in water+10× SYPRO Orange® (Life Technologies cat #S-6650) is dispensed into a 384 well plate. An equimolar amount of gRNA diluted in solutions with varied pH and salt is then added. After incubating at room temperature for 10′and brief centrifugation to remove any bubbles, a Bio-Rad CFX384™ Real-Time System C1000 Touch™ Thermal Cycler with the Bio-Rad CFX Manager software is used to run a gradient from 20° C. to 90° C. with a 1° C. increase in temperature every 10 seconds.

[0296] The second assay consists of mixing various concentrations of gRNA with fixed concentration (e.g. 2 μM) Cas9 in optimal buffer from assay 1 above and incubating (e.g. at RT for 10′) in a 384 well plate. An equal volume of optimal buffer+10× SYPRO Orange® (Life Technologies cat #S-6650) is added and the plate sealed with Microseal® B adhesive (MSB-1001). Following brief centrifugation to remove any bubbles, a Bio-Rad CFX384™ Real-Time System C1000 Touch™ Thermal Cycler with the Bio-Rad CFX Manager software is used to run a gradient from 20° C. to 90° C. with a 1° C. increase in temperature every 10 seconds.

### Genome Editing Strategies

[0297] The genome editing systems described above are used, in various embodiments of the present disclosure, to generate edits in (i.e. to alter) targeted regions of DNA within or obtained from a cell. Various strategies are described herein to generate particular edits, and these strategies are generally described in terms of the desired repair outcome, the number and positioning of individual edits (e.g. SSBs or DSBs), and the target sites of such edits.

[0298] Genome editing strategies that involve the formation of SSBs or DSBs are characterized by repair outcomes including: (a) deletion of all or part of a targeted region; (b) insertion into or replacement of all or part of a targeted region; or (c) interruption of all or part of a targeted region. This grouping is not intended to be limiting, or to be binding to any particular theory or model, and is offered solely for economy of presentation. Skilled artisans will appreciate that the listed outcomes are not mutually exclusive and that some repairs may result in other outcomes. The description of a particular editing strategy or method should not be understood to require a particular repair outcome unless otherwise specified.

[0299] Replacement of a targeted region generally involves the replacement of all or part of the existing sequence within the targeted region with a homologous sequence, for instance through gene correction or gene conversion, two repair outcomes that are mediated by HDR pathways. HDR is promoted by the use of a donor template, which can be single-stranded or double stranded, as described in greater detail below. Single or double stranded templates can be exogenous, in which case they will promote gene correction, or they can be endogenous (e.g. a homologous sequence within the cellular genome), to promote gene conversion. Exogenous templates can have asymmetric overhangs (i.e. the portion of the template that is complementary to the site of the DSB may be offset in a 3′ or 5′ direction, rather than being centered within the donor template), for instance as described by Richardson 2016 (incorporated by reference herein). In instances where the template is single stranded, it can correspond to either the complementary (top) or non-complementary (bottom) strand of the targeted region.

[0300] Gene conversion and gene correction are facilitated, in some cases, by the formation of one or more nicks in or around the targeted region, as described in Ran & Hsu 2013 and Cotta-Ramusino. In some cases, a dual-nickase strategy is used to form two offset SSBs that, in turn, form a single DSB having an overhang (e.g. a 5′ overhang).

[0301] Interruption and/or deletion of all or part of a targeted sequence can be achieved by a variety of repair outcomes. As one example, a sequence can be deleted by simultaneously generating two or more DSBs that flank a targeted region, which is then excised when the DSBs are repaired, as is described in Maeder for the LCA10 mutation. As another example, a sequence can be interrupted by a deletion generated by formation of a double strand break with single-stranded overhangs, followed by exonucleolytic processing of the overhangs prior to repair.

[0302] One specific subset of target sequence interruptions is mediated by the formation of an indel within the targeted sequence, where the repair outcome is typically mediated by NHEJ pathways (including Alt-NHEJ). NHEJ is referred to as an “error prone” repair pathway because of its association with indel mutations. In some cases, however, a DSB is repaired by NHEJ without alteration of the sequence around it (a so-called “perfect” or “scarless” repair); this generally requires the two ends of the DSB to be perfectly ligated. Indels, meanwhile, are thought to arise from enzymatic processing of free DNA ends before they are ligated that adds and/or removes nucleotides from either or both strands of either or both free ends.

[0303] Because the enzymatic processing of free DSB ends may be stochastic in nature, indel mutations tend to be variable, occurring along a distribution, and can be influenced by a variety of factors, including the specific target site, the cell type used, the genome editing strategy used, etc. Even so, it is possible to draw limited generalizations about indel formation: deletions formed by repair of a single DSB are most commonly in the 1-50 bp range, but can reach greater than 100-200 bp. Insertions formed by repair of a single DSB tend to be shorter and often include short duplications of the sequence immediately surrounding the break site. However, it is possible to obtain large insertions, and in these cases, the inserted sequence has often been traced to other regions of the genome or to plasmid DNA present in the cells.

[0304] Indel mutations—and genome editing systems configured to produce indels—are useful for interrupting target sequences, for example, when the generation of a specific final sequence is not required and/or where a frameshift mutation would be tolerated. They can also be useful in settings where particular sequences are preferred, insofar as the certain sequences desired tend to occur preferentially from the repair of an SSB or DSB at a given site. Indel mutations are also a useful tool for evaluating or screening the activity of particular genome editing systems and their components. In these and other settings, indels can be characterized by (a) their relative and absolute frequencies in the genomes of cells contacted with genome editing systems and (b) the distribution of numerical differences relative to the unedited sequence, e.g. ±1, ±2, ±3, etc. As one example, in a lead-finding setting, multiple gRNAs can be screened to identify those gRNAs that most efficiently drive cutting at a target site based on an indel readout under controlled conditions. Guides that produce indels at or above a threshold frequency, or that produce a particular distribution of indels, can be selected for further study and development. Indel frequency and distribution can also be useful as a readout for evaluating different genome editing system implementations or formulations and delivery methods, for instance by keeping the gRNA constant and varying certain other reaction conditions or delivery methods.

### Multiplex Strategies

[0305] Genome editing systems according to this disclosure may also be employed for multiplex gene editing to generate two or more DSBs, either in the same locus or in different loci. Any of the RNA-guided nucleases and gRNAs disclosed herein may be used in genome editing systems for multiplex gene editing. Strategies for editing that involve the formation of multiple DSBs, or SSBs, are described in, for instance, Cotta-Ramusino.

[0306] As disclosed herein, multiple gRNAs may be used in genome editing systems to introduce alterations (e.g., deletions, insertions) into the 13 nt target region of HBG1 and/or HBG2. In certain embodiments, one or more gRNAs comprising a targeting domain set forth in SEQ ID NOs: 251-901, 940-942 may be used to introduce alterations in the 13 nt target region of HBG1 and/or HBG2. In other embodiments, multiple gRNAs may be used in genome editing systems to introduce alterations into the CCAAT box target region. In certain embodiments, one or more gRNAs comprising a sequence set forth in SEQ ID NOs: 970, 971, 996, 997 may be used to introduce alterations in the CCAAT box target region. In certain embodiments, one or more gRNAs comprising a targeting domain set forth in SEQ ID NOs: 1002, 1004 may be used to introduce alterations in the CCAAT box target region. In other embodiments, multiple gRNAs may be used in genome editing systems to introduce alterations into the GATA1 binding motif in BCL11Ae. In certain embodiments, one or more gRNAs comprising a targeting domain set forth in SEQ ID NOs: 952-955 may be used to introduce alterations in the GATA1 binding motif in BCL11Ae. Multiple gRNAs may also be used in genome editing systems to introduce alterations into the GATA1 binding motif in BCL11Ae, the CCAAT box target region, the 13 nt target region of HBG1 and/or HBG2, or a combination thereof. In certain embodiments, one or more gRNAs comprising a targeting domain set forth in SEQ ID NOs: 952-955 may be used to introduce alterations in the GATA1 binding motif in BCL11Ae and one or more gRNAs comprising a targeting domain set forth in SEQ ID NOs: 251-901, 940-942 may be used to introduce alterations in the 13 nt target region of HBG1 and/or HBG2. In certain embodiments, one or more gRNAs comprising a targeting domain set forth in SEQ ID NOs: 952-955 may be used to introduce alterations in the GATA1 binding motif in BCL11Ae and one or more gRNAs or gRNAs comprising a targeting domain set forth in SEQ ID NOs: 970, 971, 996, 997 may be used to introduce alterations in the CCAAT box target region. In certain embodiments, one or more gRNAs comprising a targeting domain set forth in SEQ ID NOs: 952-955 may be used to introduce alterations in the GATA1 binding motif in BCL11Ae and one or more gRNAs comprising a targeting domain set forth in SEQ ID NOs: 1002, 1004 may be used to introduce alterations in the CCAAT box target region.

[0307] In certain embodiments, multiple gRNAs and an RNA-guided nuclease may be used in genome editing systems to introduce alterations (e.g., deletions, insertions) into the CCAAT box target region of HBG1 and/or HBG2. In certain embodiments, the RNA-guided nuclease may be a Cas9, modified Cas9 (e.g., D10A), Cpf1, or modified Cpf1.

### Donor Template Design

[0308] Donor template design is described in detail in the literature, for instance in Cotta-Ramusino. DNA oligomer donor templates (oligodeoxynucleotides or ODNs), which can be single stranded (ssODNs) or double-stranded (dsODNs), can be used to facilitate HDR-based repair of DSBs or to boost overall editing rate, and are particularly useful for introducing alterations into a target DNA sequence, inserting a new sequence into the target sequence, or replacing the target sequence altogether.

[0309] Whether single-stranded or double stranded, donor templates generally include regions that are homologous to regions of DNA within or near (e.g. flanking or adjoining) a target sequence to be cleaved. These homologous regions are referred to here as “homology arms,” and are illustrated schematically below:
[0310] [5′ homology arm]-[replacement sequence]-[3′ homology arm].

[0311] The homology arms can have any suitable length (including 0 nucleotides if only one homology arm is used), and 3′ and 5′ homology arms can have the same length, or can differ in length. The selection of appropriate homology arm lengths can be influenced by a variety of factors, such as the desire to avoid homologies or microhomologies with certain sequences such as Alu repeats or other very common elements. For example, a 5′ homology arm can be shortened to avoid a sequence repeat element. In other embodiments, a 3′ homology arm can be shortened to avoid a sequence repeat element. In some embodiments, both the 5′ and the 3′ homology arms can be shortened to avoid including certain sequence repeat elements. In addition, some homology arm designs can improve the efficiency of editing or increase the frequency of a desired repair outcome. For example, Richardson 2016, which is incorporated by reference herein, found that the relative asymmetry of 3′ and 5′ homology arms of single stranded donor templates influenced repair rates and/or outcomes.

[0312] Replacement sequences in donor templates have been described elsewhere, including in Cotta-Ramusino. A replacement sequence can be any suitable length (including zero nucleotides, where the desired repair outcome is a deletion), and typically includes one, two, three or more sequence modifications relative to the naturally-occurring sequence within a cell in which editing is desired. One common sequence modification involves the alteration of the naturally-occurring sequence to repair a mutation that is related to a disease or condition of which treatment is desired. Another common sequence modification involves the alteration of one or more sequences that are complementary to, or then, the PAM sequence of the RNA-guided nuclease or the targeting domain of the gRNA(s) being used to generate an SSB or DSB, to reduce or eliminate repeated cleavage of the target site after the replacement sequence has been incorporated into the target site.

[0313] Where a linear ssODN is used, it can be configured to (i) anneal to the nicked strand of the target nucleic acid, (ii) anneal to the intact strand of the target nucleic acid, (iii) anneal to the plus strand of the target nucleic acid, and/or (iv) anneal to the minus strand of the target nucleic acid. An ssODN may have any suitable length, e.g., about, at least, or no more than 80-200 nucleotides (e.g., 80, 90, 100, 110, 120, 130, 140, 150, 160, 170, 180, 190, or 200 nucleotides).

[0314] It should be noted that a template nucleic acid can also be a nucleic acid vector, such as a viral genome or circular double stranded DNA, e.g., a plasmid. Nucleic acid vectors comprising donor templates can include other coding or non-coding elements. For example, a template nucleic acid can be delivered as part of a viral genome (e.g. in an AAV or lentiviral genome) that includes certain genomic backbone elements (e.g. inverted terminal repeats, in the case of an AAV genome) and optionally includes additional sequences coding for a gRNA and/or an RNA-guided nuclease. In certain embodiments, the donor template can be adjacent to, or flanked by, target sites recognized by one or more gRNAs, to facilitate the formation of free DSBs on one or both ends of the donor template that can participate in repair of corresponding SSBs or DSBs formed in cellular DNA using the same gRNAs. Exemplary nucleic acid vectors suitable for use as donor templates are described in Cotta-Ramusino, which is incorporated by reference.

[0315] Whatever format is used, a template nucleic acid can be designed to avoid undesirable sequences. In certain embodiments, one or both homology arms can be shortened to avoid overlap with certain sequence repeat elements, e.g., Alu repeats, LINE elements, etc.

[0316] In certain embodiments, silent, non-pathogenic SNPs may be included in the ssODN donor template to allow for identification of a gene editing event.

[0317] In certain embodiments, a donor template may be a non-specific template that is non-homologous to regions of DNA within or near a target sequence to be cleaved. In certain embodiments, donor templates for use in targeting the GATA1 binding motif in BCL11Ae may include, without limitation, non-target specific templates that are nonhomologous to regions of DNA within or near the GATA1 binding motif in BCL11Ae. In certain embodiments, donor templates for use in targeting the 13 nt target region may include, without limitation, non-target specific templates that are nonhomologous to regions of DNA within or near the 13 nt target region.

[0318] A donor template or template nucleic acid, as that term is used herein, refers to a nucleic acid sequence which can be used in conjunction with an RNA nuclease molecule and one or more gRNA molecules to alter (e.g., delete, disrupt, or modify) a target DNA sequence. In certain embodiments, the template nucleic acid results in an alteration (e.g., deletion) at the CCAAT box target region of HBG1 and/or HBG2. In certain embodiments, the alteration is a non-naturally occurring alteration. In certain embodiments, the non-naturally occurring alteration at the CCAAT box target region of HBG1 and/or HBG2 may comprise the 18 nt target region, the 11 nt target region, the 4 nt target region, or the 1 nt target region, or a combination thereof. In certain embodiments, the alteration is a naturally occurring alteration. In certain embodiments, the naturally occurring alteration at the CCAAT box target region of HBG1 and/or HBG2 may comprise the 13 nt target region, the c.-117 G>A target region, or a combination thereof. In certain embodiments, the template nucleic acid is an ssODN. In certain embodiments, the ssODN is a positive strand or a negative strand.

[0319] For example, a template nucleic acid for introducing the 18 nt deletion at the 18 nt target region (HBG1 c.-104 to -121, HBG2 c.-104 to -121, or a combination thereof) may comprise a 5′ homology arm, a replacement sequence, and a 3′ homology arm, where the replacement sequence is 0 nucleotides or 0 bp. In certain embodiments, the 5′ homology arm may be about 25 to about 200 nucleotides or more in length, e.g., at least about 25, 50, 75, 100, 125, 150, 175, or 200 nucleotides in length. In certain embodiments, the 5′ homology arm comprises about 50 to 100 bp, e.g., 55 to 95, 60 to 90, 70 to 90, or 80 to 90 bp, homology 5′ of the 18 nt target region. In certain embodiments, the 3′ homology arm may be about 25 to about 200 nucleotides or more in length, e.g., at least about 25, 50, 75, 100, 125, 150, 175, or 200 nucleotides in length. In certain embodiments, the 3′ homology arm comprises about 50 to 100 bp, e.g., 55 to 95, 60 to 90, 70 to 90, or 80 to 90 bp, homology 3′ of the 18 nt target region. In certain embodiments, the 5′ and 3′ homology arms are symmetrical in length. In certain embodiments, the 5′ and 3′ homology arms are asymmetrical in length. In certain embodiments, the template nucleic acid is an ssODN. In certain embodiments, the ssODN is a positive strand. In certain embodiments, the ssODN is a negative strand. In certain embodiments, the ssODN comprises, consists essentially of, or consists of SEQ ID NO:974 (OLI16409) or SEQ ID NO:975 (OLI16410).

[0320] In certain embodiments, a template nucleic acid for introducing the 11 nt deletion at the 11 nt target region (HBG1 c.-105 to -115, HBG2 c.-105 to -115, or a combination thereof) may comprise a 5′ homology arm, a replacement sequence, and a 3′ homology arm, where the replacement sequence is 0 nucleotides or 0 bp. In certain embodiments, the 5′ homology arm may be about 25 to about 200 nucleotides in length, e.g., at least about 25, 50, 75, 100, 125, 150, 175, or 200 nucleotides in length. In certain embodiments, the 5′ homology arm comprises about 50 to 100 bp, e.g., 55 to 95, 60 to 90, 70 to 90, or 80 to 90 bp, homology 5′ of the 11 nt target region. In certain embodiments, the 3′ homology arm may be about 25 to about 200 nucleotides in length, e.g., at least about 25, 50, 75, 100, 125, 150, 175, or 200 nucleotides in length. In certain embodiments, the 3′ homology arm comprises about 50 to 100 bp, e.g., 55 to 95, 60 to 90, 70 to 90, or 80 to 90 bp, homology 3′ of the 11 nt target region. In certain embodiments, the 5′ and 3′ homology arms are symmetrical in length. In certain embodiments, the 5′ and 3′ homology arms are asymmetrical in length. In certain embodiments, the template nucleic acid is an ssODN. In certain embodiments, the ssODN is a positive strand. In certain embodiments, the ssODN is a negative strand. In certain embodiments, the ssODN comprises, consists essentially of, or consists of SEQ ID NO:976 (OLI16411) or SEQ ID NO:978 (OLI16413).

[0321] In certain embodiments, a template nucleic acid for introducing the 4 nt deletion at the 4 nt target region (HBG1 c.-112 to -115, HBG2 c.-112 to -115, or a combination thereof) may comprise a 5′ homology arm, a replacement sequence, and a 3′ homology arm, where the replacement sequence is 0 nucleotides or 0 bp. In certain embodiments, the 5′ homology arm may be about 25 to about 200 nucleotides in length, e.g., at least about 25, 50, 75, 100, 125, 150, 175, or 200 nucleotides in length. In certain embodiments, the 5′ homology arm comprises about 50 to 100 bp, e.g., 55 to 95, 60 to 90, 70 to 90, or 80 to 90 bp, homology 5′ of the 4 nt target region. In certain embodiments, the 3′ homology arm may be about 25 to about 200 nucleotides in length, e.g., at least about 25, 50, 75, 100, 125, 150, 175, or 200 nucleotides in length. In certain embodiments, the 3′ homology arm comprises about 50 to 100 bp, e.g., 55 to 95, 60 to 90, 70 to 90, or 80 to 90 bp, homology 3′ of the 4 nt target region. In certain embodiments, the 5′ and 3′ homology arms are symmetrical in length. In certain embodiments, the 5′ and 3′ homology arms are asymmetrical in length. In certain embodiments, the template nucleic acid is an ssODN. In certain embodiments, the ssODN is a positive strand. In certain embodiments, the ssODN is a negative strand. In certain embodiments, the ssODN comprises, consists essentially of, or consists of SEQ ID NO:984 (OLI16419), SEQ ID NO:985 (OLI16420), SEQ ID NO:986 (OLI16421), SEQ ID NO: 987 (OLI16422), SEQ ID NO:988 (OLI16423), SEQ ID NO:989 (OLI16424), SEQ ID NO:990 (OLI16425), SEQ ID NO:991 (OLI16426), SEQ ID NO:992 (OLI16427), SEQ ID NO:993 (OLI16428), SEQ ID NO:994 (OLI16429), or SEQ ID NO:995 (OLI16430).

[0322] In certain embodiments, a template nucleic acid for introducing the 1 nt deletion at the 1 nt target region (HBG1 c.-116, HBG2 c.-116, or a combination thereof) may comprise a 5′ homology arm, a replacement sequence, and a 3′ homology arm, where the replacement sequence is 0 nucleotides or 0 bp. In certain embodiments, the 5′ homology arm may be about 25 to about 200 nucleotides in length, e.g., at least about 25, 50, 75, 100, 125, 150, 175, or 200 nucleotides in length. In certain embodiments, the 5′ homology arm comprises about 50 to 100 bp, e.g., 55 to 95, 60 to 90, 70 to 90, or 80 to 90 bp, homology 5′ of the 1 nt target region. In certain embodiments, the 3′ homology arm may be about 25 to about 200 nucleotides in length, e.g., at least about 25, 50, 75, 100, 125, 150, 175, or 200 nucleotides in length. In certain embodiments, the 3′ homology arm comprises about 50 to 100 bp, e.g., 55 to 95, 60 to 90, 70 to 90, or 80 to 90 bp, homology 3′ of the 1 nt target region. In certain embodiments, the 5′ and 3′ homology arms are symmetrical in length. In certain embodiments, the 5′ and 3′ homology arms are asymmetrical in length. In certain embodiments, the template nucleic acid is an ssODN. In certain embodiments, the ssODN is a positive strand. In certain embodiments, the ssODN is a negative strand. In certain embodiments, the ssODN comprises, consists essentially of, or consists of SEQ ID NO:982 (OLI16417) or SEQ ID NO:983 (OLI16418).

[0323] In certain embodiments, the alteration at the CCAAT box target region recapitulates or is similar to a naturally occurring alteration, such as a 13 nt deletion. In certain embodiments, a template nucleic acid for introducing the 13 nt deletion at the 13 nt target region (HBG1 c.-116, HBG2 c.-116, or a combination thereof) may comprise a 5′ homology arm, a replacement sequence, and a 3′ homology arm, where the replacement sequence is 0 nucleotides or 0 bp. In certain embodiments, the 5′ homology arm may be about 25 to about 200 nucleotides in length, e.g., at least about 25, 50, 75, 100, 125, 150, 175, or 200 nucleotides in length. In certain embodiments, the 5′ homology arm comprises about 50 to 100 bp, e.g., 55 to 95, 60 to 90, 70 to 90, or 80 to 90 bp, homology 5′ of the 13 nt target region. In certain embodiments, the 3′ homology arm may be about 25 to about 200 nucleotides in length, e.g., at least about 25, 50, 75, 100, 125, 150, 175, or 200 nucleotides in length. In certain embodiments, the 3′ homology arm comprises about 50 to 100 bp, e.g., 55 to 95, 60 to 90, 70 to 90, or 80 to 90 bp, homology 3′ of the 13 nt target region. In certain embodiments, the 5′ and 3′ homology arms are symmetrical in length. In certain embodiments, the 5′ and 3′ homology arms are asymmetrical in length. In certain embodiments, the template nucleic acid is an ssODN. In certain embodiments, the ssODN is a positive strand. In certain embodiments, the ssODN is a negative strand. In certain embodiments, the ssODN comprises, consists essentially of, or consists of SEQ ID NO:979 (OLI16414) or SEQ ID NO:977 (OLI16412).

[0324] In certain embodiments, the alteration at the CCAAT box target region recapitulates or is similar to a naturally occurring alteration, such as a substitution from G to A at the -117G>A target region. In certain embodiments, a template nucleic acid for introducing the -117G>A substitution at the -117G>A target region (HBG1 c.-117 G>A, HBG2 c.-117 G>A, or a combination thereof) may comprise a 5′ homology arm, a replacement sequence, and a 3′ homology arm, where the replacement sequence is 0 nucleotides or 0 bp. In certain embodiments, the 5′ homology arm may be about 100 to about 200 nucleotides in length, e.g., at least about 100, 125, 150, 175, or 200 nucleotides in length. In certain embodiments, the 5′ homology arm comprises about 50 to 100 bp, e.g., 55 to 95, 60 to 90, 70 to 90, or 80 to 90 bp, homology 5′ of the -117G>A target region. In certain embodiments, the 3′ homology arm may be about 25 to about 200 nucleotides in length, e.g., at least about 25, 50, 75, 100, 125, 150, 175, or 200 nucleotides in length. In certain embodiments, the 3′ homology arm comprises about 50 to 100 bp, e.g., 55 to 95, 60 to 90, 70 to 90, or 80 to 90 bp, homology 3′ of the -117G>A target region. In certain embodiments, the 5′ and 3′ homology arms are symmetrical in length. In certain embodiments, the 5′ and 3′ homology arms are asymmetrical in length. In certain embodiments, the template nucleic acid is an ssODN. In certain embodiments, the ssODN is a positive strand. In certain embodiments, the ssODN is a negative strand. In certain embodiments, the ssODN comprises, consists essentially of, or consists of SEQ ID NO:980 (OLI16415) or SEQ ID NO:981 (OLI16416).

[0325] In certain embodiments, the 5′ homology arm comprises a 5′ phosphorothioate (PhTx) modification. In certain embodiments, the 3′ homology arm comprises a 3′ PhTx modification. In certain embodiments, the template nucleic acid comprises a 5′ and 3′ PhTx modification.

[0326] In certain embodiments, the ssODNs for introducing alterations (e.g., deletions) at the CCAAT box target region may be used in conjunction with an RNA nuclease and one or more gRNAs that target the CCAAT target region, for example, the gRNAs disclosed in Table 7, Table 10, Table 12, Table 13, Table 18, Table 19.

### Target Cells

[0327] Genome editing systems according to this disclosure can be used to manipulate or alter a cell, e.g., to edit or alter a target nucleic acid. The manipulating can occur, in various embodiments, in vivo or ex vivo.

[0328] A variety of cell types can be manipulated or altered according to the embodiments of this disclosure, and in some cases, such as in vivo applications, a plurality of cell types are altered or manipulated, for example by delivering genome editing systems according to this disclosure to a plurality of cell types. In other cases, however, it may be desirable to limit manipulation or alteration to a particular cell type or types. For instance, it can be desirable in some instances to edit a cell with limited differentiation potential or a terminally differentiated cell, such as a photoreceptor cell in the case of Maeder, in which modification of a genotype is expected to result in a change in cell phenotype. In other cases, however, it may be desirable to edit a less differentiated, multipotent or pluripotent, stem or progenitor cell. By way of example, the cell may be an embryonic stem cell, induced pluripotent stem cell (iPSC), hematopoietic stem/progenitor cell (HSPC), or other stem or progenitor cell type that differentiates into a cell type of relevance to a given application or indication.

[0329] As a corollary, the cell being altered or manipulated is, variously, a dividing cell or a non-dividing cell, depending on the cell type(s) being targeted and/or the desired editing outcome.

[0330] When cells are manipulated or altered ex vivo, the cells can be used (e.g. administered to a subject) immediately, or they can be maintained or stored for later use. Those of skill in the art will appreciate that cells can be maintained in culture or stored (e.g. frozen in liquid nitrogen) using any suitable method known in the art.

### Implementation of Genome Editing Systems: Delivery, Formulations, and Routes of Administration

[0331] As discussed above, the genome editing systems of this disclosure can be implemented in any suitable manner, meaning that the components of such systems, including without limitation the RNA-guided nuclease, gRNA, and optional donor template nucleic acid, can be delivered, formulated, or administered in any suitable form or combination of forms that results in the transduction, expression or introduction of a genome editing system and/or causes a desired repair outcome in a cell, tissue or subject. Tables 3 and 4 set forth several, non-limiting examples of genome editing system implementations. Those of skill in the art will appreciate, however, that these listings are not comprehensive, and that other implementations are possible. With reference to Table 3 in particular, the table lists several exemplary implementations of a genome editing system comprising a single gRNA and an optional donor template. However, genome editing systems according to this disclosure can incorporate multiple gRNAs, multiple RNA-guided nucleases, and other components such as proteins, and a variety of implementations will be evident to the skilled artisan based on the principles illustrated in the table. In the table, [N/A] indicates that the genome editing system does not include the indicated component.

TABLE 3
Genome Editing System Components

| RNA-guided | | Donor | |
|---|---|---|---|
| Nuclease | gRNA | Template | Comments |
| Protein | RNA | [N/A] | An RNA-guided nuclease protein |
| | | | complexed with a gRNA molecule |
| | | | (an RNP complex) |
| Protein | RNA | DNA | An RNP complex as described above |
| | | | plus a single-stranded or double |
| | | | stranded donor template. |
| Protein | DNA | [N/A] | An RNA-guided nuclease protein plus |
| | | | gRNA transcribed from DNA. |
| Protein | DNA | DNA | An RNA-guided nuclease protein plus |
| | | | gRNA-encoding DNA and a separate |
| | | | DNA donor template. |
| Protein | DNA | | An RNA-guided nuclease protein and |
| | | | a single DNA encoding both a gRNA |
| | | | and a donor template. |
| DNA | | | A DNA or DNA vector encoding an |
| | | | RNA-guided nuclease, a gRNA and |
| | | | a donor template. |
| DNA | DNA | [N/A] | Two separate DNAs, or two separate |
| | | | DNA vectors, encoding the RNA- |
| | | | guided nuclease and the gRNA, |
| | | | respectively. |
| DNA | DNA | DNA | Three separate DNAs, or three |
| | | | separate DNA vectors, encoding the |
| | | | RNA-guided nuclease, the gRNA and |
| | | | the donor template, respectively. |
| DNA | | [N/A] | A DNA or DNA vector encoding an |
| | | | RNA-guided nuclease and a gRNA |
| DNA | | DNA | A first DNA or DNA vector encoding |
| | | | an RNA-guided nuclease and a gRNA, |
| | | | and a second DNA or DNA vector |
| | | | encoding a donor template. |
| DNA | DNA | | A first DNA or DNA vector encoding |
| | | | an RNA-guided nuclease and second |
| | | | DNA or DNA vector encoding a |
| | | | gRNA and a donor template. |
| DNA | | | A first DNA or DNA vector encoding |
| | DNA | | an RNA-guided nuclease and a donor |
| | | | template, and a second DNA or DNA |
| | | | vector encoding a gRNA |
| DNA | | | A DNA or DNA vector encoding an |
| | RNA | | RNA-guided nuclease and a donor |
| | | | template, and a gRNA |
| RNA | | [N/A] | An RNA or RNA vector encoding |
| | | | an RNA-guided nuclease and |
| | | | comprising a gRNA |
| RNA | | DNA | An RNA or RNA vector encoding an |
| | | | RNA-guided nuclease and comprising |
| | | | a gRNA, and a DNA or DNA vector |
| | | | encoding a donor template. |

[0332] Table 4 summarizes various delivery methods for the components of genome editing systems, as described herein. Again, the listing is intended to be exemplary rather than limiting.

TABLE 4

| | | Delivery | | | |
|---|---|---|---|---|---|
| | | into Non- | | | Type of |
| | | Dividing | Duration of | Genome | Molecule |
| Delivery Vector/Mode | | Cells | Expression | Integration | Delivered |
| Physical (e.g., electroporation, | | YES | Transient | NO | Nucleic Acids |
| particle gun, Calcium | | | | | and Proteins |
| Phosphate transfection, cell | | | | | |
| compression or squeezing) | | | | | |
| Viral | Retrovirus | NO | Stable | YES | RNA |
| | Lentivirus | YES | Stable | YES/NO with | RNA |
| | | | | modifications | |
| | Adenovirus | YES | Transient | NO | DNA |
| | Adeno- | YES | Stable | NO | DNA |
| | Associated Virus | | | | |
| | (AAV) | | | | |
| | Vaccinia Virus | YES | Very | NO | DNA |
| | | | Transient | | |
| | Herpes Simplex | YES | Stable | NO | DNA |
| | Virus | | | | |
| Non-Viral | Cationic | YES | Transient | Depends | Nucleic Acids |
| | Liposomes | | | om what is | and Proteins |
| | | | | delivered | |
| | Polymeric | YES | Transient | Depends | Nucleic Acids |
| | Nanoparticles | | | om what is | and Proteins |
| | | | | delivered | |
| Biological | Attenuated | YES | Transient | NO | Nucleic Acids |
| Non-Viral | Bacteria | | | | |
| Delivery | Engineered | YES | Transient | NO | Nucleic Acids |
| Vehicles | Bacteriophages | | | | |
| | Mammalian | YES | Transient | NO | Nucleic Acids |
| | Virus-like | | | | |
| | Particles | | | | |
| | Biological | YES | Transient | NO | Nucleic Acids |
| | liposomes: | | | | |
| | Erythrocyte | | | | |
| | Ghosts and | | | | |
| | Exosomes | | | | |

### Nucleic Acid-Based Delivery of Genome Editing Systems

[0333] Nucleic acids encoding the various elements of a genome editing system according to the present disclosure can be administered to subjects or delivered into cells by art-known methods or as described herein. For example, RNA-guided nuclease-encoding and/or gRNA-encoding DNA, as well as donor template nucleic acids can be delivered by, e.g., vectors (e.g., viral or non-viral vectors), non-vector based methods (e.g., using naked DNA or DNA complexes), or a combination thereof.

[0334] Nucleic acids encoding genome editing systems or components thereof can be delivered directly to cells as naked DNA or RNA, for instance by means of transfection or electroporation, or can be conjugated to molecules (e.g., N-acetylgalactosamine) promoting uptake by the target cells (e.g., erythrocytes, HSCs). Nucleic acid vectors, such as the vectors summarized in Table 4, can also be used.

[0335] Nucleic acid vectors can comprise one or more sequences encoding genome editing system components, such as an RNA-guided nuclease, a gRNA and/or a donor template. A vector can also comprise a sequence encoding a signal peptide (e.g., for nuclear localization, nucleolar localization, or mitochondrial localization), associated with (e.g., inserted into or fused to) a sequence coding for a protein. As one example, a nucleic acid vectors can include a Cas9 coding sequence that includes one or more nuclear localization sequences (e.g., a nuclear localization sequence from SV40).

[0336] The nucleic acid vector can also include any suitable number of regulatory/control elements, e.g., promoters, enhancers, introns, polyadenylation signals, Kozak consensus sequences, or internal ribosome entry sites (IRES). These elements are well known in the art, and are described in Cotta-Ramusino.

[0337] Nucleic acid vectors according to this disclosure include recombinant viral vectors. Exemplary viral vectors are set forth in Table 4, and additional suitable viral vectors and their use and production are described in Cotta-Ramusino. Other viral vectors known in the art can also be used. In addition, viral particles can be used to deliver genome editing system components in nucleic acid and/or peptide form. For example, “empty” viral particles can be assembled to contain any suitable cargo. Viral vectors and viral particles can also be engineered to incorporate targeting ligands to alter target tissue specificity.

[0338] In addition to viral vectors, non-viral vectors can be used to deliver nucleic acids encoding genome editing systems according to the present disclosure. One important category of non-viral nucleic acid vectors are nanoparticles, which can be organic or inorganic. Nanoparticles are well known in the art, and are summarized in Cotta-Ramusino. Any suitable nanoparticle design can be used to deliver genome editing system components or nucleic acids encoding such components. For instance, organic (e.g. lipid and/or polymer) nonparticles can be suitable for use as delivery vehicles in certain embodiments of this disclosure. Exemplary lipids for use in nanoparticle formulations, and/or gene transfer are shown in Table 5, and Table 6 lists exemplary polymers for use in gene transfer and/or nanoparticle formulations.

TABLE 5
Lipids Used for Gene Transfer

| Lipid | Abbreviation | Feature |
|---|---|---|
| 1,2-Dioleoyl-sn-glycero-3-phosphatidylcholine | DOPC | Helper |
| 1,2-Dioleoyl-sn-glycero-3-phosphatidylethanolamine | DOPE | Helper |
| Cholesterol | | Helper |
| N-[1-(2,3-Dioleyloxy)propyl]N,N,N-trimethylammonium chloride | DOTMA | Cationic |
| 1,2-Dioleoyloxy-3-trimethylammonium-propane | DOTAP | Cationic |
| Dioctadecylamidoglycylspermine | DOGS | Cationic |
| N-(3-Aminopropyl)-N,N-dimethyl-2,3-bis(dodecyloxy)-1- | GAP-DLRIE | Cationic |
| propanaminium bromide | | |
| Cetyltrimethylammonium bromide | CTAB | Cationic |
| 6-Lauroxyhexyl ornithinate | LHON | Cationic |
| 1-(2,3-Dioleoyloxypropyl)-2,4,6-trimethylpyridinium | 20c | Cationic |
| 2,3-Dioleyloxy-N-[2(sperminecarboxamido-ethyl]-N,N- | DOSPA | Cationic |
| dimethyl-1-propanaminium trifluoroacetate | | |
| 1,2-Dioleyl-3-trimethylammonium-propane | DOPA | Cationic |
| N-(2-Hydroxyethyl)-N,N-dimethyl-2,3-bis(tetradecyloxy)-1- | MDRIE | Cationic |
| propanaminium bromide | | |
| Dimyristooxypropyl dimethyl hydroxyethyl ammonium bromide | DMRI | Cationic |
| 3β-[N-(N′,N′-Dimethylaminoethane)-carbamoyl]cholesterol | DC-Chol | Cationic |
| Bis-guanidium-tren-cholesterol | BGTC | Cationic |
| 1,3-Diodeoxy-2-(6-carboxy-spermyl)-propylamide | DOSPER | Cationic |
| Dimethyloctadecylammonium bromide | DDAB | Cationic |
| Dioctadecylamidoglicylspermidin | DSL | Cationic |
| rac-[(2,3-Dioctadecyloxypropyl)(2-hydroxyethyl)]- | CLIP-1 | Cationic |
| dimethylammonium chloride | | |
| rac-[2(2,3-Dihexadecyloxypropyl- | CLIP-6 | Cationic |
| oxymethyloxy)ethyl]trimethylammonium bromide | | |
| Ethyldimyristoylphosphatidylcholine | EDMPC | Cationic |
| 1,2-Distearyloxy-N,N-dimethyl-3-aminopropane | DSDMA | Cationic |
| 1,2-Dimyristoyl-trimethylammonium propane | DMTAP | Cationic |
| O,O′-Dimyristyl-N-lysyl aspartate | DMKE | Cationic |
| 1,2-Distearoyl-sn-glycero-3-ethylphosphocholine | DSEPC | Cationic |
| N-Palmitoyl D-erythro-sphingosyl carbamoyl-spermine | CCS | Cationic |
| N-t-Butyl-N0-tetradecyl-3-tetradecylaminopropionamidine | diC14-amidine | Cationic |
| Octadecenolyoxy[ethyl-2-heptadecenyl-3 hydroxyethyl] | DOTIM | Cationic |
| imidazolinium chloride | | |
| N1-Cholesteryloxycarbonyl-3,7-diazanonane-1,9-diamine | CDAN | Cationic |
| 2-(3-[Bis(3-amino-propyl)-amino]propylamino)-N- | RPR209120 | Cationic |
| ditetradecylcarbamoylme-ethyl-acetamide | | |
| 1,2-dilinoleyloxy-3- dimethylaminopropane | DLinDMA | Cationic |
| 2,2-dilinoleyl-4-dimethylaminoethyl-[1,3]- dioxolane | DLin-KC2-DMA | Cationic |
| dilinoleyl- methyl-4-dimethylaminobutyrate | DLin-MC3-DMA | Cationic |

TABLE 6
Polymers Used for Gene Transfer

| Polymer | Abbreviation |
|---|---|
| Poly(ethylene)glycol | PEG |
| Polyethylenimine | PEI |
| Dithiobis(succinimidylpropionate) | DSP |
| Dimethyl-3,3′-dithiobispropionimidate | DTBP |
| Poly(ethylene imine) biscarbamate | PEIC |
| Poly(L-lysine) | PLL |
| Histidine modified PLL | |
| Poly(N-vinylpyrrolidone) | PVP |
| Poly(propylenimine) | PPI |
| Poly(amidoamine) | PAMAM |
| Poly(amido ethylenimine) | SS-PAEI |
| Triethylenetetramine | TETA |
| Poly(β-aminoester) | |
| Poly(4-hydroxy-L-proline ester) | PHP |
| Poly(allylamine) | |
| Poly(α-[4-aminobutyl]-L-glycolic acid) | PAGA |
| Poly(D,L-lactic-co-glycolic acid) | PLGA |
| Poly(N-ethyl-4-vinylpyridinium bromide) | |
| Poly(phosphazene)s | PPZ |
| Poly(phosphoester)s | PPE |
| Poly (phosphoramidate)s | PPA |
| Poly(N-2-hydroxypropylmethacrylamide) | pHPMA |
| Poly (2-(dimethylamino)ethyl methacrylate) | pDMAEMA |
| Poly(2-aminoethyl propylene phosphate) | PPE-EA |
| Chitosan | |
| Galactosylated chitosan | |
| N-Dodacylated chitosan | |
| Histone | |
| Collagen | |
| Dextran-spermine | D-SPM |

[0339] Non-viral vectors optionally include targeting modifications to improve uptake and/or selectively target certain cell types. These targeting modifications can include e.g., cell specific antigens, monoclonal antibodies, single chain antibodies, aptamers, polymers, sugars (e.g., N-acetylgalactosamine (GalNAc)), and cell penetrating peptides. Such vectors also optionally use fusogenic and endosome-destabilizing peptides/polymers, undergo acid-triggered conformational changes (e.g., to accelerate endosomal escape of the cargo), and/or incorporate a stimuli-cleavable polymer, e.g., for release in a cellular compartment. For example, disulfide-based cationic polymers that are cleaved in the reducing cellular environment can be used.

[0340] In certain embodiments, one or more nucleic acid molecules (e.g., DNA molecules) other than the components of a genome editing system, e.g., the RNA-guided nuclease component and/or the gRNA component described herein, are delivered. In certain embodiments, the nucleic acid molecule is delivered at the same time as one or more of the components of the Genome editing system. In certain embodiments, the nucleic acid molecule is delivered before or after (e.g., less than about 30 minutes, 1 hour, 2 hours, 3 hours, 6 hours, 9 hours, 12 hours, 1 day, 2 days, 3 days, 1 week, 2 weeks, or 4 weeks) one or more of the components of the Genome editing system are delivered. In certain embodiments, the nucleic acid molecule is delivered by a different means than one or more of the components of the genome editing system, e.g., the RNA-guided nuclease component and/or the gRNA component, are delivered. The nucleic acid molecule can be delivered by any of the delivery methods described herein. For example, the nucleic acid molecule can be delivered by a viral vector, e.g., an integration-deficient lentivirus, and the RNA-guided nuclease molecule component and/or the gRNA component can be delivered by electroporation, e.g., such that the toxicity caused by nucleic acids (e.g., DNAs) can be reduced. In certain embodiments, the nucleic acid molecule encodes a therapeutic protein, e.g., a protein described herein. In certain embodiments, the nucleic acid molecule encodes an RNA molecule, e.g., an RNA molecule described herein.

Delivery of RNPs and/or RNA Encoding Genome Editing System Components

[0341] RNPs (complexes of gRNAs and RNA-guided nucleases) and/or RNAs encoding RNA-guided nucleases and/or gRNAs, can be delivered into cells or administered to subjects by art-known methods, some of which are described in Cotta-Ramusino. In vitro, RNA-guided nuclease-encoding and/or gRNA-encoding RNA can be delivered, e.g., by microinjection, electroporation, transient cell compression or squeezing (see, e.g., Lee 2012). Lipid-mediated transfection, peptide-mediated delivery, GalNAc-or other conjugate-mediated delivery, and combinations thereof, can also be used for delivery in vitro and in vivo. A protective, interactive, non-condensing (PINC) system may be used for delivery.

[0342] In vitro delivery via electroporation comprises mixing the cells with the RNA encoding RNA-guided nucleases and/or gRNAs, with or without donor template nucleic acid molecules, in a cartridge, chamber or cuvette and applying one or more electrical impulses of defined duration and amplitude. Systems and protocols for electroporation are known in the art, and any suitable electroporation tool and/or protocol can be used in connection with the various embodiments of this disclosure.

### Route of Administration

[0343] Genome editing systems, or cells altered or manipulated using such systems, can be administered to subjects by any suitable mode or route, whether local or systemic. Systemic modes of administration include oral and parenteral routes. Parenteral routes include, by way of example, intravenous, intramarrow, intrarterial, intramuscular, intradermal, subcutaneous, intranasal, and intraperitoneal routes. Components administered systemically can be modified or formulated to target, e.g., HSCs, hematopoietic stem/progenitor cells, or erythroid progenitors or precursor cells.

[0344] Local modes of administration include, by way of example, intramarrow injection into the trabecular bone or intrafemoral injection into the marrow space, and infusion into the portal vein. In certain embodiments, significantly smaller amounts of the components (compared with systemic approaches) can exert an effect when administered locally (for example, directly into the bone marrow) compared to when administered systemically (for example, intravenously). Local modes of administration can reduce or eliminate the incidence of potentially toxic side effects that may occur when therapeutically effective amounts of a component are administered systemically.

[0345] Administration can be provided as a periodic bolus (for example, intravenously) or as continuous infusion from an internal reservoir or from an external reservoir (for example, from an intravenous bag or implantable pump). Components can be administered locally, for example, by continuous release from a sustained release drug delivery device.

[0346] In addition, components can be formulated to permit release over a prolonged period of time. A release system can include a matrix of a biodegradable material or a material which releases the incorporated components by diffusion. The components can be homogeneously or heterogeneously distributed within the release system. A variety of release systems can be useful, however, the choice of the appropriate system will depend upon rate of release required by a particular application. Both non-degradable and degradable release systems can be used. Suitable release systems include polymers and polymeric matrices, non-polymeric matrices, or inorganic and organic excipients and diluents such as, but not limited to, calcium carbonate and sugar (for example, trehalose). Release systems may be natural or synthetic. However, synthetic release systems are preferred because generally they are more reliable, more reproducible and produce more defined release profiles. The release system material can be selected so that components having different molecular weights are released by diffusion through or degradation of the material.

[0347] Representative synthetic, biodegradable polymers include, for example: polyamides such as poly(amino acids) and poly(peptides); polyesters such as poly(lactic acid), poly(glycolic acid), poly(lactic-co-glycolic acid), and poly(caprolactone); poly(anhydrides); polyorthoesters; polycarbonates; and chemical derivatives thereof (substitutions, additions of chemical groups, for example, alkyl, alkylene, hydroxylations, oxidations, and other modifications routinely made by those skilled in the art), copolymers and mixtures thereof. Representative synthetic, non-degradable polymers include, for example: polyethers such as poly(ethylene oxide), poly(ethylene glycol), and poly(tetramethylene oxide); vinyl polymers-polyacrylates and polymethacrylates such as methyl, ethyl, other alkyl, hydroxyethyl methacrylate, acrylic and methacrylic acids, and others such as poly(vinyl alcohol), poly(vinyl pyrolidone), and poly(vinyl acetate); poly(urethanes); cellulose and its derivatives such as alkyl, hydroxyalkyl, ethers, esters, nitrocellulose, and various cellulose acetates; polysiloxanes; and any chemical derivatives thereof (substitutions, additions of chemical groups, for example, alkyl, alkylene, hydroxylations, oxidations, and other modifications routinely made by those skilled in the art), copolymers and mixtures thereof.

[0348] Poly(lactide-co-glycolide) microsphere can also be used. Typically the microspheres are composed of a polymer of lactic acid and glycolic acid, which are structured to form hollow spheres. The spheres can be approximately 15-30 microns in diameter and can be loaded with components described herein. In some embodiments, genome editing systems, system components and/or nucleic acids encoding system components, are delivered with a block copolymer such as a poloxamer or a poloxamine.

### Multi-Modal or Differential Delivery of Components

[0349] Skilled artisans will appreciate, in view of the instant disclosure, that different components of genome editing systems disclosed herein can be delivered together or separately and simultaneously or non-simultaneously. Separate and/or asynchronous delivery of genome editing system components can be particularly desirable to provide temporal or spatial control over the function of genome editing systems and to limit certain effects caused by their activity.

[0350] Different or differential modes as used herein refer to modes of delivery that confer different pharmacodynamic or pharmacokinetic properties on the subject component molecule, e.g., a RNA-guided nuclease molecule, gRNA, template nucleic acid, or payload. For example, the modes of delivery can result in different tissue distribution, different half-life, or different temporal distribution, e.g., in a selected compartment, tissue, or organ.

[0351] Some modes of delivery, e.g., delivery by a nucleic acid vector that persists in a cell, or in progeny of a cell, e.g., by autonomous replication or insertion into cellular nucleic acid, result in more persistent expression of and presence of a component. Examples include viral, e.g., AAV or lentivirus, delivery.

[0352] By way of example, the components of a genome editing system, e.g., a RNA-guided nuclease and a gRNA, can be delivered by modes that differ in terms of resulting half-life or persistent of the delivered component the body, or in a particular compartment, tissue or organ. In certain embodiments, a gRNA can be delivered by such modes. The RNA-guided nuclease molecule component can be delivered by a mode which results in less persistence or less exposure to the body or a particular compartment or tissue or organ.

[0353] More generally, in certain embodiments, a first mode of delivery is used to deliver a first component and a second mode of delivery is used to deliver a second component. The first mode of delivery confers a first pharmacodynamic or pharmacokinetic property. The first pharmacodynamic property can be, e.g., distribution, persistence, or exposure, of the component, or of a nucleic acid that encodes the component, in the body, a compartment, tissue or organ. The second mode of delivery confers a second pharmacodynamic or pharmacokinetic property. The second pharmacodynamic property can be, e.g., distribution, persistence, or exposure, of the component, or of a nucleic acid that encodes the component, in the body, a compartment, tissue or organ.

[0354] In certain embodiments, the first pharmacodynamic or pharmacokinetic property, e.g., distribution, persistence or exposure, is more limited than the second pharmacodynamic or pharmacokinetic property.

[0355] In certain embodiments, the first mode of delivery is selected to optimize, e.g., minimize, a pharmacodynamic or pharmacokinetic property, e.g., distribution, persistence or exposure.

[0356] In certain embodiments, the second mode of delivery is selected to optimize, e.g., maximize, a pharmacodynamic or pharmacokinetic property, e.g., distribution, persistence or exposure.

[0357] In certain embodiments, the first mode of delivery comprises the use of a relatively persistent element, e.g., a nucleic acid, e.g., a plasmid or viral vector, e.g., an AAV or lentivirus. As such vectors are relatively persistent product transcribed from them would be relatively persistent.

[0358] In certain embodiments, the second mode of delivery comprises a relatively transient element, e.g., an RNA or protein.

[0359] In certain embodiments, the first component comprises gRNA, and the delivery mode is relatively persistent, e.g., the gRNA is transcribed from a plasmid or viral vector, e.g., an AAV or lentivirus. Transcription of these genes would be of little physiological consequence because the genes do not encode for a protein product, and the gRNAs are incapable of acting in isolation. The second component, a RNA-guided nuclease molecule, is delivered in a transient manner, for example as mRNA or as protein, ensuring that the full RNA-guided nuclease molecule/gRNA complex is only present and active for a short period of time.

[0360] Furthermore, the components can be delivered in different molecular form or with different delivery vectors that complement one another to enhance safety and tissue specificity.

[0361] Use of differential delivery modes can enhance performance, safety, and/or efficacy, e.g., the likelihood of an eventual off-target modification can be reduced. Delivery of immunogenic components, e.g., Cas9 molecules, by less persistent modes can reduce immunogenicity, as peptides from the bacterially-derived Cas enzyme are displayed on the surface of the cell by MHC molecules. A two-part delivery system can alleviate these drawbacks.

[0362] Differential delivery modes can be used to deliver components to different, but overlapping target regions. The formation active complex is minimized outside the overlap of the target regions. Thus, in certain embodiments, a first component, e.g., a gRNA is delivered by a first delivery mode that results in a first spatial, e.g., tissue, distribution. A second component, e.g., a RNA-guided nuclease molecule is delivered by a second delivery mode that results in a second spatial, e.g., tissue, distribution. In certain embodiments, the first mode comprises a first element selected from a liposome, nanoparticle, e.g., polymeric nanoparticle, and a nucleic acid, e.g., viral vector. The second mode comprises a second element selected from the group. In certain embodiments, the first mode of delivery comprises a first targeting element, e.g., a cell specific receptor or an antibody, and the second mode of delivery does not include that element. In certain embodiments, the second mode of delivery comprises a second targeting element, e.g., a second cell specific receptor or second antibody.

[0363] When the RNA-guided nuclease molecule is delivered in a virus delivery vector, a liposome, or polymeric nanoparticle, there is the potential for delivery to and therapeutic activity in multiple tissues, when it may be desirable to only target a single tissue. A two-part delivery system can resolve this challenge and enhance tissue specificity. If the gRNA and the RNA-guided nuclease molecule are packaged in separated delivery vehicles with distinct but overlapping tissue tropism, the fully functional complex is only be formed in the tissue that is targeted by both vectors.

### EXAMPLES

[0364] The principles and embodiments described above are further illustrated by the non-limiting examples that follow:

### Example 1: Screening of S. pyogenes gRNAs Delivered to K562 Cells as Ribonucleoprotein Complexes for Use in Causing 13 nt Deletions in HBG1 and HBG2 Regulatory Regions

[0365] gRNAs targeting a 26 nt fragment spanning and including the 13 nucleotides at the 13 nt target region of HBG1 and HBG2 were designed by standard methods. After gRNAs were designed in silico and tiered, a subset of the gRNAs were selected and screened for activity and specificity in human K562 cells. The gRNAs selected for screening are set forth in Table 7. Briefly, gRNAs were in vitro transcribed and then complexed with S. pyogenes wildtype (Wt) Cas9 protein to form ribonucleoprotein complexes (RNPs). The gRNAs complexed to S. pyogenes Cas9 protein were modified sgRNAs ((e.g., 5′ ARCA capped and 3′ polyA (20A) tail; Table 7) and target the HBG1 and HBG2 regulatory regions. To allow for direct comparison of the activity of these RNPs in K562 cells and human CD34⁺ cells, RNPs were first delivered to K562 cells by electroporation (Amaxa Nucleofector).

[0366] Three days after RNP electroporation, gDNA was extracted from K562 cells and then the HBG1 and HBG2 loci were PCR amplified from the gDNA. Gene editing was evaluated in the PCR products by T7E1 endonuclease assay analysis. Eight out of nine RNPs supported a high percentage of NHEJ. Sp37 RNP, the only gRNA shown to be active in human CD34⁺ cells (<10% editing in CD34+ cells) was highly active in K562 cells, with >60% indels detected at both HBG1 and HBG2 and eight cut in both the HBG1 and HBG2 targeted regions in the promoter sequences (FIG. 3A).

TABLE 7
Selected gRNAs for screening in K562 cells or CD34⁺ cells

| | | | Targeting | Targeting | |
|---|---|---|---|---|---|
| | Targeting | Targeting | domain sequence | domain sequence | |
| gRNA | domain | domain | plus PAM | plus PAM | |
| ID | sequence (RNA) | sequence (DNA) | (NGG) (RNA) | (NGG) (DNA) | Sense |
| Sp9 | GGCUAUUGGU | GGCTATTGGTCA | GGCUAUUGGUCA | GGCTATTGGTCA | Anti- |
| | CAAGGCA | AGGCA | AGGCAAGG | AGGCAAGG | sense |
| | (SEQ ID NO: 277) | (SEQ ID NO: 910) | (SEQ ID NO: 920) | (SEQ ID NO: 930) | |
| Sp36 | CAAGGCUAUU | CAAGGCTATTGG | CAAGGCUAUUGG | CAAGGCTATTGG | Anti- |
| | GGUCAAGGCA | TCAAGGCA | UCAAGGCAAGG | TCAAGGCAAGG | sense |
| | (SEQ ID NO: 338) | (SEQ ID NO: 911) | (SEQ ID NO: 921) | (SEQ ID NO: 931) | |
| Sp40 | UGCCUUGUCA | TGCCTTGTCAAG | UGCCUUGUCAAGG | TGCCTTGTCAAG | Anti- |
| | AGGCUAU | GCTAT | CUAUUGG | GCTATTGG | sense |
| | (SEQ ID NO: 327) | (SEQ ID NO: 912) | (SEQ ID NO: 922) | (SEQ ID NO: 932) | |
| Sp42 | GUUUGCCUUG | GTTTGCCTTGTC | GUUUGCCUUGUCA | GTTTGCCTTGTC | Anti- |
| | UCAAGGCUAU | AAGGCTAT | AGGCUAUUGG | AAGGCTATTGG | sense |
| | (SEQ ID NO: 299) | (SEQ IDNO: 913) | (SEQ ID NO: 923) | (SEQ ID NO: 933) | |
| Sp38 | GACCAAUAGC | GACCAATAGCCT | GACCAAUAGCCUU | GACCAATAGCCT | Sense |
| | CUUGACA | TGACA | GACAAGG | TGACAAGG | |
| | (SEQ ID NO: 276) | (SEQ ID NO: 914) | (SEQ ID NO: 924) | (SEQ ID NO: 934) | |
| Sp37 | CUUGACCAAU | CTTGACCAATAG | CUUGACCAAUAGC | CTTGACCAATAG | Sense |
| | AGCCUUGACA | CCTTGACA | CUUGACAAGG | CCTTGACAAGG | |
| | (SEQ ID NO: 333) | (SEQ ID NO: 915) | (SEQ ID NO: 925) | (SEQ ID NO: 935) | |
| Sp43 | GUCAAGGCUA | GTCAAGGCTATT | GUCAAGGCUAUU | GTCAAGGCTATT | Anti- |
| | UUGGUCA | GGTCA | GGUCAAGG | GGTCAAGG | sense |
| | (SEQ ID NO: 278) | (SEQ ID NO: 916) | (SEQ ID NO: 926) | (SEQ ID NO: 936) | |
| Sp35 | CUUGUCAAGG | CTTGTCAAGGCT | CUUGUCAAGGCUA | CTTGTCAAGGCT | Anti- |
| | CUAUUGGUCA | ATTGGTCA | UUGGUCAAGG | ATTGGTCAAGG | sense |
| | (SEQ ID NO: 339) | (SEQ ID NO: 917) | (SEQ ID NO: 927) | (SEQ ID NO: 937) | |
| Sp41 | UCAAGUUUGC | TCAAGTTTGCCT | UCAAGUUUGCCUU | TCAAGTTTGCCT | Anti- |
| | CUUGUCA | TGTCA | GUCAAGG | TGTCAAGG | sense |
| | (SEQ ID NO: 310) | (SEQ ID NO: 918) | (SEQ ID NO: 928) | (SEQ ID NO: 938) | |
| Sp34 | UGGUCAAGUU | TGGTCAAGTTTG | UGGUCAAGUUUG | TGGTCAAGTTTG | Anti- |
| | UGCCUUGUCA | CCTTGTCA | CCUUGUCAAGG | CCTTGTCAAGG | sense |
| | (SEQ ID NO: 340) | (SEQ ID NO: 919) | (SEQ ID NO: 929) | (SEQ ID NO: 939) | |
| Sp85 | AGUAUCCAGU | AGTATCCAGTGA | AGUAUCCAGUGA | AGTATCCAGTGA | Anti- |
| | GAGGCCA | GGCCA | GGCCAGGG | GGCCAGGG | sense |
| | (SEQ ID NO: 940) | (SEQ ID NO: 943) | (SEQ ID NO: 946) | (SEQ ID NO: 949) | |
| SpA | GGCAAGGCUG | GGCAAGGCTGG | GGCAAGGCUGGCC | GGCAAGGCTGG | Sense |
| | GCCAACCCAU | CCAACCCAT | AACCCAUGGG | CCAACCCATGGG | |
| | (SEQ ID NO: 941) | (SEQ ID NO: 944) | (SEQ ID NO: 947) | (SEQ ID NO: 950) | |
| SpB | UAUUUGCAUU | TATTTGCATTGA | UAUUUGCAUUGA | TATTTGCATTGA | Sense |
| | GAGAUAGUGU | GATAGTGT | GAUAGUGUGGG | GATAGTGTGGG | |
| | (SEQ ID NO: 942) | (SEQ ID NO: 945) | (SEQ ID NO: 948) | (SEQ ID NO: 951) | |

[0367] The HBG1 and HBG2 PCR products for the K562 cells that were targeted with the eight active sgRNAs were then analyzed by DNA sequencing analysis and scored for insertions and deletions detected. The deletions were subdivided into precise 13 nt deletions at the target site, 13 nt target site inclusive and proximal small deletions (18-26 nt), 12 nt deletions (i.e., partial deletion) of the 13 nt target site, >26 nt deletions that span a portion of the HPFH target site, and other deletions, e.g., deletions proximal to but outside the HPFH target site. Seven of the eight sgRNAs targeted deletion of the 13 nt (HPFH mutation induction) (FIG. 3B) for HBG1. At least five of the eight sgRNAs also supported targeted deletion of the 13 nt in HBG2 promoter region (FIG. 3C). Note that DNA sequence results for HBG2 in cells treated with HBG Sp34 sgRNA were not available. These data indicate that Cas9 and sgRNA support precise induction of the 13 nt deletions. FIGS. 3B-3C depict examples of the types of deletions observed in target sequences in HBG1.

### Example 2: Cas9 RNP Containing gRNA Targeting the 13 nt Deletion Mutation Supports Gene Editing in Human Hematopoietic Stem/Progenitor Cells

[0368] Of the RNPs containing different gRNAs tested in human cord blood (CB) CD34+ cells, only Sp37 resulted in detectable editing at the target site in the HBG1 and HBG2 promoters as determined by T7E1 analysis of indels in HBG1 and HBG2 specific PCR products amplified from gDNA extracted from electroporated CB CD34⁺ cells from a three cord blood donors (FIG. 4A). The average level of editing detected in cells electroporated with Cas9 protein complexed to Sp37 was 5±2% indels at HBG1 and 3±1% indels detected at HBG2 (3 separate experiments, and CB donors).

[0369] Next, three S. pyogenes gRNAs whose target sites are within the HBG promoter (Sp35, Sp36, Sp37) were complexed to wild-type S. pyogenes Cas9 protein to form ribonucleoprotein complexes. These HBG targeted RNPS were electroporated into CB CD34⁺ cells (n=3 donors) and adult mobilized peripheral blood (mPB) CD34⁺ cell donors (n=3 donors). Then the level of insertions/deletions at the target site was analyzed by T7E1 endonuclease analysis of the HBG2 PCR products amplified from genomic DNA extracted from the samples approximately 3 days after Cas9 RNP delivery. Each of these RNPs supported only low level gene editing in both the CB and adult CD34⁺ cells across 3 donors and 3 separate experiments (FIG. 4B).

[0370] To increase gene editing and the occurrence of the 13 nt deletion at the target site, single strand deoxynucleotide donor repair templates (ssODNs) that encoded 87 nt and 89 nt of homology on each side of the targeted deletion site was generated. The ssODNs, either unmodified at the ends (i.e., ssODN1, SEQ ID NO:906, Table 8) or modified to contain phosphorothioates (PhTx) at the 5′ and 3′ ends (i.e., PhTx ssODN1, SEQ ID NO:909, Table 8). The ssODN was designed to ‘encode’ the 13 nt deletion with sequence homology arms engineered flanking this absent sequence to create a perfect deletion.

TABLE 8
Single strand deoxynucleotide donor repair templates (ssODN)

| | SEQ | |
|---|---|---|
| | ID | |
| ssODN ID | NO | Sequence |
| ssODN1 | 904 | GGGTGCTTCCTTTTATTCTTCATCCCTAGCCAGCCGCCGGCCCCTG |
| 5′ homology | | GCCTCACTGGATACTCTAAGACTATTGGTCAAGTTTGCCTT |
| arm | | |
| ssODN1 | 905 | GTCAAGGCAAGGCTGGCCAACCCATGGGTGGAGTTTAGCCAGGGACCG |
| 3′ homology | | TTTCAGACAGATATTTGCATTGAGATAGTGTGGGGAAGGGG |
| arm | | |
| ssODN1 | 906 | GGGTGCTTCCTTTTATTCTTCATCCCTAGCCAGCCGCCGGCCCCTG |
| | | GCCTCACTGGATACTCTAAGACTATTGGTCAAGTTTGCCTTGTCAAG |
| | | GCAAGGCTGGCCAACCCATGGGTGGAGTTTAGCCAGGGACCGTTTCAG |
| | | ACAGATATTTGCATTGAGATAGTGTGGGGAAGGGG |
| PhTx ssODN1 | 907 | G*GGTGCTTCCTTTTATTCTTCATCCCTAGCCAGCCGCCGGCCCCTG |
| 5′ homology | | GCCTCACTGGATACTCTAAGACTATTGGTCAAGTTTGCCTT |
| arm | | |
| PhTx ssODN1 | 908 | GTCAAGGCAAGGCTGGCCAACCCATGGGTGGAGTTTAGCCAGGGACCG |
| 3′ homology | | TTTCAGACAGATATTTGCATTGAGATAGTGTGGGGAAGGG*G |
| arm | | |
| PhTx ssODN1 | 909 | G*GGTGCTTCCTTTTATTCTTCATCCCTAGCCAGCCGCCGGCCCCTG |
| | | GCCTCACTGGATACTCTAAGACTATTGGTCAAGTTTGCCTTGTCAAG |
| | | GCAAGGCTGGCCAACCCATGGGTGGAGITTAGCCAGGGACCGTTTCAG |
| | | ACAGATATTTGCATTGAGATAGTGTGGGGAAGGG*G |

The homology arms flanking the deletion are indicated by bold [5′ homology arm] and underline [3′ homology arm]). Note the absence of the 13 bp sequence in ssODN1 and PhTx ssODN1.
*Represents modification by phosphorothioate.

[0371] ssODN1 and PhTx ssODN1 were co-delivered with RNP targeting HBG containing the Sp37 gRNA (HBG Sp37 RNP) or HBG Sp35 (HBG Sp35 RNP) to CB CD34+ cells. Co-delivery of the ssODN donor encoding the 13 nt deletion with HBG Sp35 RNP or HBG Sp37 RNP led to a 6-fold and 5-fold increase in gene editing of the target site, respectively, as determined by T7E1 analysis of the HBG2 PCR product (FIG. 4C). DNA sequencing analysis (Sanger sequencing) of the HBG2 PCR product indicated that 20% gene editing in cells that were treated with HBG Sp37 RNP and the PhTx modified ssODN1, with 15% deletions and 5% insertions (FIG. 4C, lower left panel). Further analysis of the specific type and size of deletions at the target site revealed that 75% of the total deletions detected contained the 13 nt deletion (which included deletion at c.-110 of the CAAT box in the proximal promoter), the absence of which is associated with elevation of HbF expression (FIG. 4C, lower right panel). The remaining ¼ of deletions were partial deletions that did not span the full 13 nt deletion. These data indicate that co-delivery of a homologous ssODN that is engineered to have a deletion supported precise gene editing (deletion) at HBG in human CD34⁺ cells.

### Example 3: Cas9 RNP Targeting the 13 nt Deletion Mutation Supports Gene Editing in Human Adult Mobilized Peripheral Blood Hematopoietic Stem/Progenitor Cells with Increased HBG Expression in Erythroblast Progeny

[0372] To determine whether editing HBG with Cas9 RNP complexed to Sp37 gRNA or Sp35 gRNA (i.e., the gRNAs that target the 13 nt deletion that is associated with HPFH) in the promoter of HBG supports an increase in HBG expression in erythroid progeny of edited CD34+ cells, human adult CD34+ cells from mobilized peripheral blood (mPB) were electroporated with the RNPs. Briefly, mPB CD34+ cells were prestimulated for 2 days with human cytokines and PGE2 in StemSpan SFEM and then electroporated with Cas9 protein precomplexed to Sp35 and Sp37, respectively. T7E1 analysis of HBG PCR product indicated ˜3% indels detected for mPB CD34⁺ cells treated with RNP complexed to Sp37 while no editing was detected for cells that were treated with RNP complexed to Sp35 (FIG. 5A).

[0373] In order to increase gene editing at the target site and to increase the occurrence of the 13 nt deletion at the target site, PhTx ssODN1 (SEQ ID NO:909) was co-delivered with the precomplexed RNP targeting HBG containing the Sp37 gRNA. Co-delivery of the ssODN donor encoding the 13 nt deletion led to a nearly 2-fold increase in gene editing of the target site (FIG. 5A). To determine whether editing HBG increases production of fetal hemoglobin in erythroid progeny of edited adult CD34+ cells, the cells were differentiated into erythroblasts by culture for up to 18 days in the presence of human cytokines (erythropoietin, SCF, IL3), human plasma (Octoplas), and other supplements (hydrocortisone, heparin, transferrin). Over the time course of differentiation, mRNA was collected to evaluate HBG gene expression in the erythroid progeny of RNP treated mPB CD34+ cells and donor matched negative (untreated) controls. By day 7 of differentiation, erythroblast progeny of human CD34+ cells that were treated with HBG Sp37 RNP and 13 nt deletion encoding ssODN (˜5% indels detected in gDNA from the bulk cell population by T7E1 analysis) exhibited a 2-fold increase in HBG mRNA production (FIG. 5B). Importantly, CD34+ cells that were electroporated with HBG RNP maintained their ex vivo hematopoietic activity (i.e., no difference in the quantity or diversity of erythroid and myeloid colonies compared to untreated donor matched CD34+ cell negative control), as determined in hematopoietic colony forming cell (CFC) assays (FIG. 6A). Furthermore, the erythroblasts differentiated from RNP treated CD34+ cells maintained the kinetics of differentiation observed for donor matched untreated control cells as determined by flow analysis for acquisition of erythroid phenotype (% Glycophorin A+ cells) (FIG. 6B). These data indicate that targeted disruption of HBG1/HBG2 proximal promoter region supported an increase in HBG expression in erythroid progeny of RNP treated adult hematopoietic stem/progenitor cells without altering differentiation potential.

### Example 4: Cas9 RNP Targeting the HPFH Mutation Supports Gene Editing in Human Adult Mobilized Peripheral Blood Hematopoietic Stem/Progenitor Cells with Increased HBG Expression in Erythroblast Progeny

[0374] To determine whether co-delivery of paired nickase RNPs targeting HBG would increase targeted disruption of the proximal HBG promoter, mPB CD34+ cells were cultured for 2 days with human cytokines and PGE2 in StemSpan SFEM and then electroporated with S. pyogenes D10A Cas9 protein precomplexed to two gRNAs that target sites flanking the site of the 13 nt deletion. The targeting domain sequences for gRNAs used in nickase pairs in this example (including, without limitation, SpA, Sp85 and SpB) are presented in Table 7. D10A nickase pairs were selected such that the PAMs for the targets were oriented outward and the distance between the cut sites were <100 nt. gRNAs were complexed with D10A Cas9 protein to form RNP complexes and then human CD34⁺ cells and paired nickase were subject to electroporation. To determine whether co-delivery of an ssODN that encoded the 13 nt deletion would increase editing and introduction of the mutation into the cells, in some experiments, ssODN1 was added to the cell RNP mixture prior to electroporation. Approximately 3 days after electroporation, gDNA was extracted from the RNP treated cells and analyzed by T7E1 endonuclease assay and/or Sanger DNA sequencing of HBG2 PCR products amplified from the extracted gDNA. Of the three D10A nickase pairs tested, indels detected by T7E1 endonuclease analysis were increased for one nickase pair (gRNAs SpA+Sp85) samples for which ssODN1 was included (FIG. 7A). DNA sequencing analysis was performed on limited samples shown in FIG. 7A. DNA sequencing analysis showed up to ˜27% indels at the target site, with insertions as the dominant indel detected, followed by deletions of the targeted region (area between the cut sites of the paired nickases), and the 13 nt deletion mutation was also detected at a frequency of 2-3% when ssODN1 encoding the deletion was co-delivered (FIG. 7B). Silent, non-pathogenic SNPs were included in the ssODN1 donor template, and were detected in the sequences that contained the 13 nt deletion, indicating that creation of the HFPH mutation occurred through an HDR event.

### Example 5: D10A Paired RNPs Electroporated into Adult CD34+ Cells Supports Induction of HbF Protein in Erythroid Progeny

[0375] To further optimize editing conditions in mPB CD34+ cells at the target site and to evaluate editing in additional human cell donors, human mPB CD34+ cells were electroporated with D10A Cas9 and WT Cas9 paired RNPs targeting HBG. The most efficient guide pair for both D10A Cas9 and WT Cas9 RNPs was Sp37+SpA, which supported >30% indels as determined by T7E1 endonuclease analysis of HBG2 PCR products (FIG. 8A). Given that editing at both HBG1 and HBG2 could result in large deletions of HBG2 and the intergenic region between HBG2 and HBG1, indels were further characterized in order to capture local indels by T7E1 endonuclease assay and sequencing and large deletion by ddPCR analysis. Large deletions were detected in all samples at variable frequencies for both D10A Cas9 and WT Cas9 RNP nickase pairs (FIG. 8B). Illumina sequencing analysis of indels correlated with indels determined by T7E1 analysis (FIG. 8C-8D).

[0376] To determine whether CD34+ cells edited with dual nickases at the HBG promoter gave rise to erythroid progeny with elevated HbF expression, donor matched RNP treated and untreated controls were induced toward erythroid differentiation and then evaluated for maintenance of indels during differentiation and for expression of HbF mRNA and protein. The level of editing (as determined by T7E1 endonuclease assay) was evaluated over the first 2 weeks of erythroid differentiation in the progeny of RNP treated cells prior to enucleation. Indels were detected in the erythroid progeny at every time point assayed suggesting that the editing that occurred in the CD34⁺ cells was maintained during erythroid differentiation and that edited CD34⁺ cells maintain erythroid differentiation potential.

[0377] The levels of HBG mRNA (day 10 of differentiation) and HbF protein (day 20-23 of differentiation) were quantified by ddPCR and HPLC analysis (according to the HPLC method described in Chang 2017 at pp. 143-44, incorporated by reference herein), respectively (FIG. 9). A ˜2-fold increase (+40% in in HBG transcripts vs. unedited donor matched control) was observed for HBG: HBA ratio (data not shown) and the ratio of HbF/HbF+HbA (i.e. HBG mRNA/HGB+HBB mRNA) increased to 30% above the level detected in donor matched untreated control samples.

[0378] For the D10A Cas9 nickase pairs, upregulation of HbF mRNA and protein was detected in erythroid progeny (FIG. 9). With respect to HbF protein analysis, two pairs supported 20% HbF induction for two D10A nickase pairs. No HbF upregulation was detected in erythroid progeny of WT Cas9 RNP treated CD34+ cells (data not shown).

### Example 6: Increasing the Dose of RNP Increases Total Editing Efficiency in Human Adult CD34+ Cells at the HBG Locus

[0379] The concentration of D10A Cas9 RNP for the nickase pair SpA+Sp85 was increased (2.5 μM standard concentration and 3.7 μM) and delivered to mPB CD34⁺ cells by electroporation. The increased RNP concentration supported an increase in indels at the HBG target site to >30% (FIG. 10A) as determined by T7E1 endonuclease analysis of the HBG PCR product amplified for gDNA extracted 3 days after electroporation of CD34⁺ cells. Sequencing analysis indicated that increasing the RNP concentration increased insertions (FIG. 10B). Erythroid progeny of RNP treated CD34⁺ cells also had an increase in HbF protein production (FIG. 10C). Importantly, the hematopoietic colony forming potential was maintained after editing (FIG. 10D). These cells were then transplanted into immunodeficient mice and their engraftment 1 month (FIG. 10E) and 2 months (FIG. 10F) after transplantation was evaluated by sampling the peripheral blood and measuring the percentage of human CD45⁺ cells. Early engraftment data showed no difference in engraftment between recipient cohorts of donor matched untreated controls (0 μM RNP) and mice transplanted with RNP treated cells. Furthermore, there was no difference in human blood lineage distribution (myeloid, B cell, T cell) within the human CD45⁺ fraction among cohorts at indicated time points (FIG. 10G-H).

[0380] Two additional D10A nickase pairs were also tested in RNP dose response studies in adult mPB CD34⁺ cells (Sp37+SpA, Sp37+SpB). Here, mPB CD34⁺ cells were electroporated with D10A paired nickases delivered at 0, 2.5, and 3.75 μM of total RNP. RNP treated cells were differentiated into erythroid progeny and the HbF protein levels (% HbF/HbF+HbA) were analyzed by HPLC analysis. The indel frequency detected in CD34⁺ cells was plotted with the HbF levels detected in erythroid progeny in order to correlate editing and HbF induction (FIG. 11A). RNP treated and untreated control mPB CD34⁺ cells were also differentiated into colonies to evaluate ex vivo hematopoietic activity. Colony forming cell (CFC) activity was maintained for the progeny of RNP treated and donor matched untreated control CD34⁺ cells (FIG. 11B). There was no difference in the percentage of human CD45+ cells in the mouse peripheral blood 1 month after transplantation and no difference in blood lineage distribution (FIG. 11C-D) for cells exposed to different D10A RNP pairs at different doses compared to untreated donor matched control CD34⁺ cells.

### Example 7: Co-Delivery of RNP Targeting the Erythroid Specific Enhancer of BCL11A and a Non-Specific (N) Single Strand Deoxynucleotide Sequence or Paired RNPs Increases Gene Editing in Human CD34⁺ Cells and Supports Induction of Fetal Hemoglobin Expression in Erythroid Progeny

[0381] Fetal hemoglobin expression can be induced through targeted disruption of the erythroid cell specific expression of a transcriptional repressor, BCL11A (Canvers 2015). One potential strategy to increase HbF expression through a gene editing strategy is to multiplex gene editing for introduction of 13 nt deletion associated in the HBG proximal promoter and also for targeted disruption of the GATA1 binding motif in the erythroid specific enhancer of BCL11A that is in the +58 DHS region of intron 2 of the BCL11A gene (FIG. 12). In order to accomplish this multiplex strategy to increase HbF expression through multiplex gene editing, the effect of disruption of BCL11A erythroid enhancer (BCL11Ae) must first be determined as a single editing event.

[0382] In this experiment, CB CD34⁺ cells were electroporated with S. pyogenes WT Cas9 complexed to in vitro transcribed sgRNA targeting the GATA1 motif in the +58 DHS region of intron 2 of BCL11A gene (gRNA SpK, Table 9) (FIG. 13A). To determine whether co-delivery of a non-target specific ssODN would increase editing of the target sequence, BCL11Ae RNP was co-delivered with ssODN (which is nonhomologous to the BCL11Ae target sequence) in CB CD34⁺ cells. T7E1 analysis of BCL11A erythroid enhancer PCR product from gDNA extracted from CB CD34⁺ cells treated with BCL11Ae RNP indicated that ˜5% indels was achieved (FIG. 13A). Co-delivery of BCL11Ae RNP with a non-target specific ssODN increase in indels by 5-fold to 20% as detected by T7E1 endonuclease analysis. Illumina sequencing analysis indicated that >90% of edits had disruption of the GATA1 motif in the +DHS 58 region enhancer in intron 2 of the BCL11A gene (data not shown). To increase editing, human CB CD34+ cells were electroporated with WT Cas9 RNP (single gRNAs complexed to WT Cas9) or with WT Cas9 paired RNPs (paired gRNAs complexed to WT Cas9), so that the cut sites in each pair flank the target site for excision of the GATA1 motif (gRNAs SpC, SpK, SpM, SpN) (Table 9). Two of the single gRNAs and two pairs had >50% indels as determined by T7E1 endonuclease analysis (FIG. 13B).

TABLE 9
Select gRNA sequences targeting BCL11A erythroid enhancer for screening
in CD34⁺ cells

| | Targeting | Targeting | Targeting | Targeting | |
|---|---|---|---|---|---|
| | domain | domain | domain | domain | |
| gRNA | sequence | sequence | sequence plus | sequence plus | |
| ID | (RNA) | (DNA) | PAM(NGG)(RNA) | PAM(NGG)(DNA) | Sense |
| SpK | CUAACAGUUG | CTAACAGTTGC | CUAACAGUUGCU | CTAACAGTTGCT | Anti- |
| | CUUUUAUCAC | TTTTATCAC | UUUAUCACAGG | TTTATCACAGG | sense |
| | (SEQ ID NO: | (SEQ ID NO: | (SEQ ID NO: | (SEQ ID NO: 964) | |
| | 952) | 956) | 960) | | |
| SpM | GGGCGUGGGU | GGGCGTGGGT | GGGCGUGGGUGG | GGGCGTGGGTGG | Anti- |
| | GGGGUAGAAG | GGGGTAGAAG | GGUAGAAGAGG | GGTAGAAGAGG | sense |
| | (SEQ ID NO: | (SEQ ID NO: | (SEQ ID NO: | (SEQ ID NO: 965) | |
| | 953) | 957) | 961) | | |
| SpN | CUCUUAGACA | CTCTTAGACAT | CUCUUAGACAUA | CTCTTAGACATA | Anti- |
| | UAACACACCA | AACACACCA | ACACACCAGGG | ACACACCAGGG | sense |
| | (SEQ ID NO: | (SEQ ID NO: | (SEQ ID NO: | (SEQ ID NO: 966) | |
| | 954) | 958) | 962) | | |
| SpC | AUCAGAGGCC | ATCAGAGGCC | AUCAGAGGCCAA | ATCAGAGGCCAA | Sense |
| | AAACCCUUCC | AAACCCTTCC | ACCCUUCCUGG | ACCCTTCCTGG | |
| | (SEQ ID NO: | (SEQ ID NO: | (SEQ ID NO: | (SEQ ID NO: 967) | |
| | 955) | 959) | 963) | | |

[0383] Next, human adult bone marrow CD34⁺ cells were electroporated with the BCL11Ae RNP. DNA sequencing analysis of the BCL11A PCR product amplified from gDNA extracted from marrow CD34⁺ cells indicated 15% gene editing comprised of insertions and deletions (FIG. 14A). Importantly, all deletions resulted in deletion of the GATA1 motif and all insertions disrupted GATA1 motif through addition of a small number of bp in the motif. CD34⁺ cells were plated into colony forming assays and the mixed hematopoietic colonies (GEMMs), which correspond to CD34⁺ cell clones, were picked. gDNA was isolated and analyzed by Illumina sequencing to quantify monoallelic and biallelic disruption of the target site. Most GEMMs differentiated from the CD34⁺ cell clones had monoallelic disruption and biallelic disruption was also detected, with the overall indel rate ˜2/3 higher compared to what was detected in the bulk CD34⁺ cell population (FIG. 14B). This was likely a reflection of the percentage of common myeloid progenitors (CMPs) that give rise to GEMMs that make up a larger fraction of the heterogenous CD34⁺ cells versus the other lineages present, but not captured/differentiated in the short-term CFC assays. The RNP treated marrow CD34⁺ cells also maintained similar kinetics of erythroid maturation (enucleation, FIG. 14C) and differentiation (phenotype acquisition, FIG. 14D) compared to donor matched untreated control cells. Erythroid progeny of edited marrow CD34⁺ cells exhibited ˜5-fold increase in HbF induction as determined by flow cytometry analysis (FIG. 14E).

[0384] Gene editing and induction of fetal hemoglobin was also evaluated in human adult mPB CD34+ cells. Co-delivery of BCL11Ae RNP and nonspecific ssODN supported ˜20% indels at the target site (FIG. 15A). To evaluate early induction of fetal hemoglobin in erythroid progeny of edited cells, mPB CD34⁺ cells were differentiated into erythroblasts and induction of fetal hemoglobin transcription (HBG mRNA) was evaluated by qRT-PCR analysis. The erythroid progeny of BCL11Ae RNP treated CD34⁺ cells exhibited a 2-fold induction of HBG mRNA compared to untreated controls, suggesting induction of fetal hemoglobin expression (FIG. 15B). The RNP treated marrow CD34⁺ cells also maintained similar kinetics of differentiation (phenotype acquisition, FIG. 15C) compared to donor matched untreated control cells.

### Example 8: Electroporation of Cas9 RNP Targeting the Distal CCAAT Box at the HBG Promoter in Human Hematopoietic Stem/Progenitor Cells Generates Several Deletions that Promote HBG Expression after Erythroid Differentiation

[0385] Hereditary persistence of fetal hemoglobin (HPFH phenotype) is observed in patients carrying a 13 nt deletion overlapping with the HBG distal CCAAT box. Cas9-RNP targeting the HBG distal CCAAT box can be used in hematopoietic stem/progenitor cells (HSPCs) to reproduce the HPFH phenotype, likely by disrupting the binding sites of transcription factors repressing HBG expression. DNA double strand breaks (DSBs) created by Cas9 RNP can lead to a variety of repair outcomes, including insertions and deletions proximal to the RNP cut site. Some of the introduced indels may disrupt the binding of repressing factors less efficiently. It was envisioned that ssODN donor templates could be used to improve the frequency of indels reproducing the HPFH phenotype by directing the repair towards specific deletions that leads to HBG gene expression.

[0386] To evaluate the repair outcome of Cas9-RNP targeting the distal CCAAT box at the HBG promoter, Cas9 was complexed with the chemically synthesized guide RNA OLI7066 (SEQ ID NO:970, Table 10) (“OLI7066-RNP”) and RNP were electroporated into HSPCs at 16 μM. Sequencing analysis (next generation sequencing) performed at day 2 post-electroporation indicated that 23.7% of the alleles carried the 13 nt deletion identical to the naturally occurring HPFH mutation (FIG. 16, 13 nt deletion indicated by “Δ-102:-114”). Several other frequent deletions were also observed around the OLI7066-RNP cut site (FIG. 16).

TABLE 10
Sequences of chemically synthesized gRNA targeting the CCAAT box, with or
without end modifications.

| Name | Oli-ID | gRNA sequence (RNA) | gRNA sequence (DNA) |
|---|---|---|---|
| Sp35 | OLI7066 | CUUGUCAAGGCUAUUGGUCAG | CTTGTCAAGGCTATTGGTCA |
| unmodified | | UUUUAGAGCUAGAAAUAGCAA | GTTTTAGAGCTAGAAATAGC |
| | | GUUAAAAUAAGGCUAGUCCGU | AAGTTAAAATAAGGCTAGTC |
| | | UAUCAACUUGAAAAAGUGGCA | CGTTATCAACTTGAAAAAGT |
| | | CCGAGUCGGUGCUUUU | GGCACCGAGTCGGTGCTTTT |
| | | (SEQ ID NO: 970) | (SEQ ID NO: 972) |
| Sp35 5′-3′ | OLI8394 | mC*mU*mU*GUCAAGGCUAUUG | mC*mT*mT*GTCAAGGCTATT |
| PSOMe | | GUCAGUUUUAGAGCUAGAAAU | GGTCAGTTTTAGAGCTAGAA |
| | | AGCAAGUUAAAAUAAGGCUAG | ATAGCAAGTTAAAATAAGGC |
| | | UCCGUUAUCAACUUGAAAAAG | TAGTCCGTTATCAACTTGAA |
| | | UGGCACCGAGUCGGUGCmU*m | AAAGTGGCACCGAGTCGGTG |
| | | U*mU*U (SEQ ID NO: 971) | CmT*mT*mT*T |
| | | | (SEQ ID NO: 973) |

*Represents phosphorothioate modification
m: Represents 2-o-methyl modification

[0387] A single cell experiment was performed to evaluate the level of HbF expression induced by the most frequent deletions generated by delivery of RNP (Cas9 complexed with the gRNA OLI7066 (SEQ ID NO: 970) (“OLI7066-RNP”)) targeting the distal CCAAT box. Briefly, single HSPC electroporated with OLI7066-RNP complexes targeting the distal CCAAT box were plated in single wells and differentiated into erythroid cells by culturing for 18 days in the presence of human cytokines (erythropoietin, SCF, IL3), human plasma (Octoplas), and other supplements (hydrocortisone, heparin, transferrin, insulin). A fraction of the erythroid progeny from each single cell was split after 14 days for gDNA extraction. Sequencing analysis of the PCR product from HBG1 and HBG2 was performed to identify the genotype of each clonal population. ddPCR analysis was also performed on the genomic DNA of each clonal populations to detect deletions of the 4.9 kb fragment between the guide RNA target sites in HBG1 and HBG2. At day 18, the erythroid cells deriving from each clone were lysed and the relative expression of the globin chains was determined by ultra-performance liquid chromatography (UPLC). Finally, the level of G-gamma (Gγ)-globin, A-gamma (Aγ)-globin chain expression (or AG-gamma (AGγ)-globin resulting from the 4.9 kb deletion) as determined by [gamma chain]/[all-gamma chains+beta chain] was compared relative to the indels carried at HBG1 and HBG2 respectively. The 13 nt deletion that reproduces the HPFH genotype was shown to induce HBG expression. In addition several unique non-naturally occurring deletions that induced HBG expression at comparable levels were identified. These include HBG Δ-112:-115 (“4 nt deletion”), HBG Δ-104:-121 (“18 nt deletion”), HBG Δ-116 (“1 nt deletion”) (FIGS. 17A-D).

### Example 9: Co-Delivery of Cas9 RNP Targeting the Region at or Near the Distal CCAAT Box with ssODN Donors Supports Precise Gene Editing in Human Hematopoietic Stem/Progenitor Cells and Increased Gamma-Globin Expression in the Erythroid Progeny

[0388] To improve the frequency of HbF inducing indels in HSPC, single strand deoxynucleotide donor repair templates (ssODNs) “encoding” identified HbF inducing deletions (e.g., the “1nt” (HBG Δ-116) and “4nt” (HBG Δ-112:-115) deletions) were designed (FIG. 18). ssODNs used to induce these deletions were as follows: “1nt” ssODNs: OLI16417-18; “4nt” ssODNs: OLI16424, OLI16430, Table 11). ssODNs were designed with 90 nt homology arms flanking this absent sequence to create a perfect deletion. The ssODNs were modified to contain phosphorothioates (PhTx) at the 5′ and 3′ ends. Additional ssODNs were designed to encode naturally occurring mutations observed in patients with HPFH (e.g., HBGΔ-102:-114 (“13 nt” deletion, FIG. 18) and HBG-117 G>A mutation (“HBG-117 G>A”). ssODNs used to induce these deletions were as follows: “13nt” ssODN: OLI16412, OLI16414 and “−117 G>A” sSODN: OLI16415-16, Table 11). Finally, to facilitate the evaluation of gene correction, ssODNs (OLI16411, OLI16413, Table 11) were designed to encode an 11 nt deletion overlapping the distal CCAAT box that occurs at low frequency after electroporation of OLI8394-RNP alone (0.1%, see FIG. 19B, FIG. 18).

TABLE 11
Single strand deoxynucleotide donor repair templates ″encoding″
deletions or mutations at or near the CCAAT box

| ssODN ID | OLI-ID | Sequence |
|---|---|---|
| Ptx ssODN - | OLI16409 | G*GTGCTTCCTTTTATTCTTCATCCCTAGCCAGCCGCCGGCCCC |
| Positive | | TGGCCTCACTGGATACTCTAAGACTATTGGTCAAGTTTGCCTT |
| Strand -18nt | | GTCAAGGCTGGCCAACCCATGGGTGGAGTTTAGCCAGGGACC |
| (180) | | GTTTCAGACAGATATTTGCATTGAGATAGTGTGGGGAAGGGG |
| | | CCCCCAAGA*G (SEQ ID NO: 974) |
| Ptx ssODN - | OLI16410 | C*TCTTGGGGGCCCCTTCCCCACACTATCTCAATGCAAATATC |
| Negative | | TGTCTGAAACGGTCCCTGGCTAAACTCCACCCATGGGTTGGCC |
| Strand -18nt | | AGCCTTGACAAGGCAAACTTGACCAATAGTCTTAGAGTATCC |
| (180) | | AGTGAGGCCAGGGGCCGGCGGCTGGCTAGGGATGAAGAATA |
| | | AAAGGAAGCAC*C (SEQ ID NO: 975) |
| Ptx ssODN - | OLI16411 | G*GCCCCTTCCCCACACTATCTCAATGCAAATATCTGTCTGAA |
| Negative | | ACGGTCCCTGGCTAAACTCCACCCATGGGTTGGCCAGCCTTGC |
| Strand -11nt | | CTTGAGACAAGGCAAACTTGACCAATAGTCTTAGAGTATCCA |
| (180) | | GTGAGGCCAGGGGCCGGCGGCTGGCTAGGGATGAAGAATAA |
| | | AAGGAAGCACC*C (SEQ ID NO: 976) |
| Ptx ssODN - | OLI16412 | G*GCCCCTTCCCCACACTATCTCAATGCAAATATCTGTCTGAA |
| Negative | | ACGGTCCCTGGCTAAACTCCACCCATGGGTTGGCCAGCCTTGC |
| Strand -13nt | | CTTGACAAGGCAAACTTGACCAATAGTCTTAGAGTATCCAGT |
| (180) | | GAGGCCAGGGGCCGGCGGCTGGCTAGGGATGAAGAATAAAA |
| | | GGAAGCACCCT*T (SEQ ID NO: 977) |
| Ptx ssODN - | OLI16413 | G*GGTGCTTCCTTTTATTCTTCATCCCTAGCCAGCCGCCGGCCC |
| Positive | | CTGGCCTCACTGGATACTCTAAGACTATTGGTCAAGTTTGCCT |
| Strand -11nt | | TGTCTCAAGGCAAGGCTGGCCAACCCATGGGTGGAGTTTAGC |
| (180) | | CAGGGACCGTTTCAGACAGATATTTGCATTGAGATAGTGTGG |
| | | GGAAGGGGC*C (SEQ ID NO: 978) |
| Ptx ssODN - | OLI16414 | A*AGGGTGCTTCCTTTTATTCTTCATCCCTAGCCAGCCGCCGGC |
| Positive | | CCCTGGCCTCACTGGATACTCTAAGACTATTGGTCAAGTTTGC |
| Strand -13nt | | CTTGTCAAGGCAAGGCTGGCCAACCCATGGGTGGAGTTTAGC |
| (180) | | CAGGGACCGTTTCAGACAGATATTTGCATTGAGATAGTGTGG |
| | | GGAAGGGGC*C (SEQ ID NO: 979) |
| Ptx ssODN - | OLI16415 | G*GCCCCTTCCCCACACTATCTCAATGCAAATATCTGTCTGAA |
| Negative | | ACGGTCCCTGGCTAAACTCCACCCATGGGTTGGCCAGCCTTGC |
| Strand 117: | | CTTAACCAATAGCCTTGACAAGGCAAACTTGACCAATAGTCTT |
| G>A (180) | | AGAGTATCCAGTGAGGCCAGGGGCCGGCGGCTGGCTAGGGAT |
| | | GAAGAATAA*A (SEQ ID NO: 980) |
| Ptx ssODN - | OLI16416 | T*TTATTCTTCATCCCTAGCCAGCCGCCGGCCCCTGGCCTCACT |
| Positive | | GGATACTCTAAGACTATTGGTCAAGTTTGCCTTGTCAAGGCTA |
| Strand 117: | | TTGGTTAAGGCAAGGCTGGCCAACCCATGGGTGGAGTTTAGC |
| G>A (180) | | CAGGGACCGTTTCAGACAGATATTTGCATTGAGATAGTGTGG |
| | | GGAAGGGGC*C (SEQ ID NO: 981) |
| Ptx ssODN - | OLI16417 | G*GCCCCTTCCCCACACTATCTCAATGCAAATATCTGTCTGAA |
| Negative | | ACGGTCCCTGGCTAAACTCCACCCATGGGTTGGCCAGCCTTGC |
| Strand -1nt | | CTTGCCAATAGCCTTGACAAGGCAAACTTGACCAATAGTCTTA |
| (180) | | GAGTATCCAGTGAGGCCAGGGGCCGGCGGCTGGCTAGGGATG |
| | | AAGAATAAA*A (SEQ ID NO: 982) |
| Ptx ssODN - | OLI16418 | T*TTTATTCTTCATCCCTAGCCAGCCGCCGGCCCCTGGCCTCAC |
| Positive | | TGGATACTCTAAGACTATTGGTCAAGTTTGCCTTGTCAAGGCT |
| Strand -1nt | | ATTGGCAAGGCAAGGCTGGCCAACCCATGGGTGGAGTTTAGC |
| (180) | | CAGGGACCGTTTCAGACAGATATTTGCATTGAGATAGTGTGG |
| | | GGAAGGGGC*C (SEQ ID NO: 983) |
| Ptx ssODN - | OLI16419 | T*GGCTAAACTCCACCCATGGGTTGGCCAGCCTTGCCTTGATA |
| Negative | | GCCTTGACAAGGCAAACTTGACCAATAGTCTTAGAGTATCCA |
| Strand -4nt | | GTGAGGCCAGGGGCCGGCGGCTGGCTAGGGATGAA*G |
| 40/80 (120) | | (SEQ ID NO: 984) |
| Ptx ssODN - | OLI16420 | C*CACCCATGGGTTGGCCAGCCTTGCCTTGATAGCCTTGACAA |
| Negative | | GGCAAACTTGACCAATAGTCTTAGAGTATCCAGTGAGGCCAG |
| Strand -4nt | | GGGCCGGCGGCTGGC*T (SEQ ID NO: 985) |
| 30/70 (100) | | |
| Ptx ssODN - | OLI16421 | A*AACGGTCCCTGGCTAAACTCCACCCATGGGTTGGCCAGCCT |
| Negative | | TGCCTTGATAGCCTTGACAAGGCAAACTTGACCAATAGTCTTA |
| Strand -4nt | | GAGTATCCAGTGAG*G (SEQ ID NO: 986) |
| (100) | | |
| Ptx ssODN - | OLI16422 | T*ATCTGTCTGAAACGGTCCCTGGCTAAACTCCACCCATGGGT |
| Negative | | TGGCCAGCCTTGCCTTGATAGCCTTGACAAGGCAAACTTGACC |
| Strand -4nt | | AATAGTCTTAGAGTATCCAGTGAGGCCAGGGGCC*G |
| (120) | | (SEQ ID NO: 987) |
| Ptx SSODN - | OLI16423 | T*CAATGCAAATATCTGTCTGAAACGGTCCCTGGCTAAACTCC |
| Negative | | ACCCATGGGTTGGCCAGCCTTGCCTTGATAGCCTTGACAAGGC |
| Strand -4nt | | AAACTTGACCAATAGTCTTAGAGTATCCAGTGAGGCCAGGGG |
| (140) | | CCGGCGGCTGGC*T (SEQ ID NO: 988) |
| Ptx ssODN - | OLI16424 | G*GCCCCTTCCCCACACTATCTCAATGCAAATATCTGTCTGAA |
| Negative | | ACGGTCCCTGGCTAAACTCCACCCATGGGTTGGCCAGCCTTGC |
| Strand -4nt | | CTTGATAGCCTTGACAAGGCAAACTTGACCAATAGTCTTAGA |
| (180) | | GTATCCAGTGAGGCCAGGGGCCGGCGGCTGGCTAGGGATGAA |
| | | GAATAAAAGG* A (SEQ ID NO: 989) |
| Ptx ssODN - | OLI16425 | T*ACTCTAAGACTATTGGTCAAGTTTGCCTTGTCAAGGCTATC |
| Positive | | AAGGCAAGGCTGGCCAACCCATGGGTGGAGTTTAGCCAGGGA |
| Strand -4nt | | CCGTTTCAGACAGATATTTGCATTGAGATAGTGTG*G |
| 40/80 (120) | | (SEQ ID NO: 990) |
| Ptx ssODN - | OLI16426 | C*TATTGGTCAAGTTTGCCTTGTCAAGGCTATCAAGGCAAGGC |
| Positive | | TGGCCAACCCATGGGTGGAGTTTAGCCAGGGACCGTTTCAGA |
| Strand -4nt | | CAGATATTTGCATTG*A (SEQ ID NO: 991) |
| 30/70 (100) | | |
| Ptx ssODN - | OLI16427 | C*CTCACTGGATACTCTAAGACTATTGGTCAAGTTTGCCTTGTC |
| Positive | | AAGGCTATCAAGGCAAGGCTGGCCAACCCATGGGTGGAGTTT |
| Strand -4nt | | AGCCAGGGACCGTT*T (SEQ ID NO: 992) |
| (100) | | |
| Ptx ssODN - | OLI16428 | C*GGCCCCTGGCCTCACTGGATACTCTAAGACTATTGGTCAAG |
| Positive | | TTTGCCTTGTCAAGGCTATCAAGGCAAGGCTGGCCAACCCATG |
| Strand -4nt | | GGTGGAGTTTAGCCAGGGACCGTTTCAGACAGAT*A |
| (120) | | (SEQ ID NO: 993) |
| Ptx ssODN - | OLI16429 | A*GCCAGCCGCCGGCCCCTGGCCTCACTGGATACTCTAAGACT |
| Positive | | ATTGGTCAAGTTTGCCTTGTCAAGGCTATCAAGGCAAGGCTGG |
| Strand -4nt | | CCAACCCATGGGTGGAGTTTAGCCAGGGACCGTTTCAGACAG |
| (140) | | ATATTTGCATTG*A (SEQ ID NO: 994) |
| Ptx ssODN - | OLI16430 | T*CCTTTTATTCTTCATCCCTAGCCAGCCGCCGGCCCCTGGCCT |
| Positive | | CACTGGATACTCTAAGACTATTGGTCAAGTTTGCCTTGTCAAG |
| Strand -4nt | | GCTATCAAGGCAAGGCTGGCCAACCCATGGGTGGAGTTTAGC |
| (180) | | CAGGGACCGTTTCAGACAGATATTTGCATTGAGATAGTGTGG |
| | | GGAAGGGGC*C (SEQ ID NO: 995) |
| Ptx ssODN - | OLI16431 | C*CCTGGCCTCACTGGATACTCTAAGACTATTGGTCAAGTTTG |
| Positive | | CCTTGTCAAGGCTGGCCAACCCATGGGTGGAGTTTAGCCAGG |
| Strand -18nt | | GACCGTTTCAGACAG*A (SEQ ID NO: 1040) |
| (100) | | |

*Represents phosphorothioate modification

[0389] The ssODN donors, OLI16409-OLI16418, OLI16424 and OLI16430 (Table 11), were co-delivered to adult mPB CD34+ cells with Cas9 protein precomplexed to OLI8394 (“OLI8394-RNP”) or Cas9 protein precomplexed to OLI7066 (“OLI7066-RNP”) targeting the HBG distal CCAAT box (Table 10). Briefly, mPB CD34+ cells were pre-stimulated for 2 days with human cytokines in X-Vivo-10 and then electroporated with a mixture composed of an ssODN donor at 2.5 μM and OLI8394-RNP or OLI7066-RNP at 2 μM. After three days post electroporation the genomic DNA was extracted, and next-generation sequencing was performed on the HBG PCR products. The level of editing was increased from 62.1% when using OLI8394-RNP alone to up to 78.73% when co-delivering “−11” ssODN (i.e., OLI16411 or OLI16413) (FIG. 19A). The level of gene correction mediated by the co-delivery of the ssODN templates to human HSPC was shown to contribute to up to 42.4% of total indels as measured by the frequency of the “−11” deletion within total indels detected by sequencing of the HBG PCR product from HSPC electroporated with OLI8394-RNP+ “11” ssODN (FIG. 19B). Efficient gene correction was observed across other ssODN templates and OLI8394-RNP (FIGS. 19C-E, G) or OLI7066-RNP (FIG. 19F).

[0390] The mPB CD34+ cells electroporated with OLI8394-RNP or OLI7066-RNP co-delivered with ssODN templates were differentiated into erythroid cells to evaluate the level of gamma-globin expression resulting from the gene editing. To determine whether co-delivering RNP with ssODNs increased the production of fetal hemoglobin in the erythroid progeny of edited adult CD34+ cells, the cells were differentiated into erythroid cells by culture for 18 days in the presence of human cytokines (erythropoietin, SCF, IL3), human plasma (Octoplas), and other supplements (hydrocortisone, heparin, transferrin, insulin). At day 18, the relative expression levels of gamma-globin chains over total beta-like globin chains (gamma chains/[gamma chains+beta chain]) was measured by UPLC. Up to 39.1% of gamma-globin was detected after co-delivery of ssODN instead of 29% when using OLI8394-RNP alone (FIGS. 20A-B).

[0391] The effect of the dose of ssODN was evaluated using ssODN OLI16424. mPB CD34+ cells were pre-stimulated for 2 days with human cytokines in X-Vivo-10 and then electroporated with a mixture composed of OLI16424-ssODN at doses ranging from 0.625 μM to 10 UM and OLI8394-RNP at 2 μM. After three days post electroporation the genomic DNA was extracted, and next-generation sequencing was performed on the HBG PCR products. Increasing the dose of ssODN up to 5 μM resulted in increased gene correction and reduced frequency of 4.9 kb deletions between HBG1 and HBG2 (as measured by ddPCR), while maintaining overall editing level and without affecting cell viability (FIGS. 21A-C). The level of gamma-globin increased up to 39.5% of total beta-like chains at the 5 μM dose of ssODN (FIG. 21D), as measured by UPLC analysis of the cell lysates after 18 days of erythroid culture.

[0392] The co-delivery of the OLI8394-RNP and the OLI16424 ssODN was further optimized by varying the relative dose of ssODN and RNP. mPB CD34+ cells were pre-stimulated for 2 days with human cytokines in X-Vivo-10 and then electroporated with a mixture composed of OLI16424-ssODN at doses ranging from 1.25 μM to 5 μM and OLI8394-RNP at 2 μM to 8 μM. After three days post electroporation the genomic DNA was extracted, and next-generation sequencing was performed on the HBG PCR products. An improved gene editing outcome, i.e., a lower frequency of 4.9 kb deletions between the HBG1 and HBG2 genes and a higher level of gene correction, was achieved with a lower RNP dose combined with a higher ssODN dose (FIG. 22A-C). This resulted in the highest level of gamma-globin expression after erythroid differentiation (FIG. 22D).

### Example 10: Gene Correction in Human Hematopoietic Stem/Progenitor Cells can be Achieved with Short ssODN Templates with Symmetrical and Asymmetrical Homology Arms

[0393] To determine whether gene correction could be achieved using templates shorter than the previously tested 180 nt lengths used in Example 9, ssODNs encoding the “4 nt” deletion (HBGΔ-112:-115) were designed and synthesized with shorter homology arms either symmetrical or asymmetrical relative to the deleted sequence (OLI16419-OLI16423, and OLI16425-OLI16429, Table 11, FIG. 23A). Briefly, mPB CD34+ cells were pre-stimulated for 2 days with human cytokines in X-Vivo-10 and then electroporated with a mixture composed of an ssODN donor (OLI16424, OLI16419 or OLI16421) at 2.5 μM and Cas9 protein precomplexed to OLI8394 (OLI8394-RNP) at 2 μM. After three days post electroporation the genomic DNA was extracted, and next-generation sequencing was performed on the HBG PCR products. Total editing and gene correction level were similar across ssODNs having symmetrical 90 nt homology arms, symmetrical 50 nt homology arms or 40/80 asymmetrical arms (FIG. 23B).

### Example 11: Co-Delivery of ssODN Donors with Paired D10A-Cas9 RNPs to Adult CD34+ Cells Supports Gene Correction at the HBG Distal CCAAT Box

[0394] To determine if ssODN-mediated gene correction to introduce CCAAT box disrupting deletions (such as, the “4nt” deletion) in mPB CD34+ cells could be supported by D10A nickase pairs, CD34+ cells were electroporated with D10A Cas9 RNPs targeting HBG, with or without ssODN (OLI16424) (Table 11). Briefly, Sp37 and SpA gRNA were chemically synthesized (OLI7075 and OLI7074, respectively, Table 12) and complexed with D10A-Cas9 nickase mutant protein. Human adult mPB CD34+ cells were pre-stimulated for 48h in medium supplemented with human cytokines. Next, the D10A-Cas9 RNP pair comprising Sp37+SpA (2 μM+2 μM) was delivered to the CD34+ cells, alone or in combination with OLI16424, and genomic DNA was extracted 3 days post-electroporation for Illumina sequencing analysis.

TABLE 12
gRNA sequences for targeting the CCAAT box in CD34⁺
cells with D10A Cas9

| gRNA | | | |
|---|---|---|---|
| ID | OLI-ID | gRNA sequence (RNA) | gRNA sequence (DNA) |
| Sp37 | OLI17075 | CUUGACCAAUAGCCUUGACA | CTTGACCAATAGCCTTGACAGTTT |
| | | GUUUUAGAGCUAGAAAUAGC | TAGAGCTAGAAATAGCAAGTTAA |
| | | AAGUUAAAAUAAGGCUAGUC | AATAAGGCTAGTCCGTTATCAAC |
| | | CGUUAUCAACUUGAAAAAGU | TTGAAAAAGTGGCACCGAGTCGG |
| | | GGCACCGAGUCGGUGCUUUU | TGCTTTT (SEQ ID NO: 998) |
| | | (SEQ ID NO: 996) | |
| SpA | OLI17074 | GGCAAGGCUGGCCAACCCAU | GGCAAGGCTGGCCAACCCATGTT |
| | | GUUUUAGAGCUAGAAAUAGC | TTAGAGCTAGAAATAGCAAGTTA |
| | | AAGUUAAAAUAAGGCUAGUC | AAATAAGGCTAGTCCGTTATCAA |
| | | CGUUAUCAACUUGAAAAAGU | CTTGAAAAAGTGGCACCGAGTCG |
| | | GGCACCGAGUCGGUGCUUUU | GTGCTTTT (SEQ ID NO: 999) |
| | | (SEQ ID NO: 997) | |

[0395] Co-delivery of the ssODN supported ˜65% indels, instead of ˜51% when the D10A-Cas9 RNP pair was delivered alone, as determined by sequencing of the HBG PCR product from genomic DNA (FIG. 24). Detailed sequencing analysis also demonstrated that 16% of the alleles carried the precise 4 nt deletion (HBG: Δ-112:-115) when the OLI16424 ssODN donor was co-delivered, whereas this deletion was undetected when the RNP pair was delivered alone. This indicated that ˜25% of indels occurred by precise gene correction in the presence of the ssODN.

### Example 12: Cpf1 RNP Containing gRNA Targeting the CCAAT Box Supports Gene Editing in Human Hematopoietic Stem/Progenitor Cells

[0396] A Cpf1 guide RNA, HBG1-1 (i.e., OLI13620 (Table 13)), was designed to target the CCAAT box. To determine optimal nuclear localization signal configuration for Acidaminococcus sp. Cpf1 (“AsCpf1”) delivery in CD34+ cells, HBG1-1 gRNA was complexed to two nuclear localization signal (NLS) variants of AsCpf1, namely His-AsCpf1-nNLS (SEQ ID NO: 1000) and His-AsCpf1-sNLS-sNLS (SEQ ID NO:1001). “His” refers to a six-histidine purification sequence, “AsCpf1” refers to the Acidaminococcus sp. Cpf1 protein sequence, “nNLS” refers to the nucleoplasmin NLS, and “sNLS” refers to the SV40 NLS.

[0397] Briefly, mPB CD34+ cells were pre-stimulated for 2 days with human cytokines in X-Vivo-10 and then electroporated with the RNPs at 5 μM or 20 μM. The genomic DNA was extracted three days post electroporation and next-generation sequencing was performed on the HBG PCR products. HBG1-1 gRNA complexed to either of the Cpf1 NLS variants tested (“His-AsCpf1-sNLS-sNLS_HBG1-1 RNP” or “His-AsCpf1-nNLS_HBG1-1 RNP”), supported editing of CD34+ cells at the 13 nt target site. His-AsCpf1-sNLS-sNLS_HBG1-1 RNP generated 60.6% edited alleles and His-AsCpf1-nNLS_HBG1-1 RNP generated 51.1% edited alleles at the highest dose tested (FIG. 25A).

TABLE 13
HBG1-1 gRNA sequence for targeting the CCAAT box in CD34⁺ cells

| | | Targeting | Targeting | Targeting domain | Targeting domain | |
|---|---|---|---|---|---|---|
| | | domain | domain | sequence plus | sequence plus | |
| gRNA | | sequence | sequence | PAM (UUUG) | PAM (TTTG) | |
| ID | OLI-ID | (RNA) | (DNA) | (RNA) | (DNA) | Sense |
| HBG1-1 | OLI13620 | CCUUGUC | CCTTGTC | UUUGCCUUGU | TTTGCCTTG | Antisense |
| | | AAGGCUA | AAGGCTA | CAAGGCUAUU | TCAAGGCT | |
| | | UUGGUC | TTGGTC | GGUC (SEQ ID | ATTGGTC | |
| | | (SEQ ID | (SEQ ID | NO: 1004) | (SEQ ID | |
| | | NO: 1002) | NO: 1003) | | NO: 1005) | |

### Example 13: Co-Delivery of Cpf1 RNP Targeting the CCAAT Box with ssODN Donors Supports Gene Editing in Human Hematopoietic Stem/Progenitor Cells

[0398] RNP comprising HBG1-1 gRNA complexed to the His-AsCpf1-sNLS-sNLS variant (“His-AsCpf1-sNLS-sNLS_HBG1-1 RNP”) were co-delivered by electroporation with single stranded oligodeoxynucleotide donor repair templates (ssODNs) to mPB CD34+ cells. As discussed in the examples above, OLI16430 and OLI16424 ssODNs were designed to “encode” a 4 nucleotide deletion and OLI16409 and OLI16410 ssODNs were designed to “encode” a 18 nucleotide deletion (Table 11). Both the 4 nt and 18 nt deletions disrupt the HBG distal CCAAT box and are associated with induction of HBG expression. The ssODNs include 90 nucleotide-long homology arms flanking the encoded absent sequence to create perfect deletion. The ssODNs were modified to contain phosphorothioates (PhTx) at the 5′ and 3′ ends (OLI16430, OLI16424, OLI16409, and OLI16410, Table 11). Briefly, human adult mPB CD34+ cells pre-stimulated for two days in medium supplemented with human cytokines were electroporated with 5 μM RNP comprising the His-AsCpf1-sNLS-sNLS protein complexed to HBG1-1 gRNA (“His-AsCpf1-sNLS-sNLS_HBG1-1 RNP”) either alone, or in combination with 2.5 μM of one of the ssODN donors (OLI16430, OLI164324, OLI16409, or OLI16410). Co-delivery of the RNP and ssODN donor encoding the 18 nt deletion with positive strand homology arms (OLI16409) enhanced the editing frequency from 39.5% without donor to 73.3%, as determined by sequencing analysis of the HBG PCR product from genomic DNA extracted at 72 hours post-electroporation (FIG. 26A).

[0399] Further analysis of the specific type and size of deletions at the target site revealed that in the presence of the 18 nt positive strand donor (OLI16409), 57.3% of alleles carried the 18 nt deletion compared to 7.5% of alleles when the His-AsCpf1-sNLS-sNLS_HBG1-1 RNP was delivered alone (FIG. 26B). The ssODN co-delivery mediated precise repair of the DNA DSB because the 18 nt deletion represented 71.2% of all the indels generated with co-delivery of ssODN OLI16409 and His-AsCpf1-SNLS-sNLS_HBG1-1 RNP, whereas the 18 nt deletion represented only 19.0% of all the indels were generated when delivering His-AsCpf1-sNLS-sNLS_HBG1-1 RNP alone (FIG. 26C).

[0400] Although the data in FIGS. 26A-26C originally suggested that codelivery of Cpf1 RNP with ssODN donors increased precise gene editing of genomic DNA resulting in the 18 nt deletion, subsequent testing repeating the experiment in Example 13 confirmed that these data were an artifact of the experiment. Nonetheless, data acquired from the subsequent repeated experiments testing the AsCpf1 RNP using the guide RNA HBG1-1 and ssODN OLI16409 indicated that codelivery of an ssODN donor supports increased total editing in human mPB-CD34+ cells, although not associated with precise repair of the DNA DSB toward the “−18nt deletion” (see Example 21).

### Example 14: Cpf1 RNP Containing gRNA Targeting the Distal CCAAT Box Region of the HBG Promoter Supports Gene Editing in Human Hematopoietic Stem/Progenitor Cells which Promotes Induction of HbF Protein Expression in the Erythroid Progeny

[0401] Guide RNA HBG1-1 (Table 14) having a targeting domain comprising SEQ ID NO:1002 (Table 15), targets a site within the HBG promoter (FIG. 27A). The HBG1-1 gRNA (SEQ ID NO:1022) was complexed to wild-type AsCpf1 (AsCpf1-sNLS-sNLS, SEQ ID NO:1001) to form an RNP (“AsCpf1-HBG1-1-RNP”, Table 14). This complex (5 μM or 20 μM) was then electroporated into mobilized peripheral blood (mPB) derived CD34+ cells using either the Amaxa nucleofector (Lonza), or the MaxCyte GT (MaxCyte, Inc.) electroporation device. The level of insertions/deletions at the target site was analyzed by Illumina sequencing (NGS) of the PCR amplified target site three days after electroporation. AsCpf1-HBG1-1-RNP supported on-target editing of 43% and 17%, respectively, on the Amaxa and MaxCyte electroporation systems (FIG. 28A (Amaxa) and 28B (MaxCyte)). Following the editing of mPB CD34+ cells, ex vivo differentiation into the erythroid linage was performed for 18 days (Giarratana 2011). Then, relative expression levels of gamma-globin chains (over total beta-like globin chains) was measured by UPLC (FIG. 28A (Amaxa) and 28B (MaxCyte)). AsCpf1-HBG1-1-RNP led to an increase of gamma-globin expression by up to 21% above levels detected in cells derived from mock electroporated mPB CD34+ cells (FIG. 28A).

TABLE 14
RNP components

| | Protein | RNP | | gRNA | gRNA sequence |
|---|---|---|---|---|---|
| gRNA ID | variant | components | RNP ID | modification | (RNA) |
| HBG1-1 | AsCpf1- | gRNA + | HBG1-1- | Synthetic | UAAUUUCUACUC |
| gRNA | SNLS-SNLS | AsCpf1 WT | AsCpf1-RNP | unmodified | UUGUAGAUCCUU |
| | (SEQ ID | | | | GUCAAGGCUAUU |
| | NO: 1001) | | | | GGUC (SEQ ID |
| | | | | | NO: 1022) |
| HBG1-1 | His-AsCpf1- | gRNA + | HBG1-1- | Synthetic | UAAUUUCUACUC |
| gRNA | SNLS-SNLS | AsCpf1 | AsCpf1H800 | unmodified | UUGUAGAUCCUU |
| | H800A | H800A | A-RNP | | GUCAAGGCUAUU |
| | (SEQ ID | | | | GGUC (SEQ ID |
| | NO: 1032) | | | | NO: 1022) |
| HBG1-1 | His-AsCpf1- | gRNA + | HBG1-1- | 5′OMe- | UAAUUUCUACUC |
| gRNA | SNLS-SNLS | AsCpf1 | AsCpf1H800 | PS2OMe | UUGUAGAUCCUU |
| | H800A | H800A | A-RNP | | GUCAAGGCUAUU |
| | (SEQ ID | | | | GGmU/PS2/mC |
| | NO: 1032) | | | | (SEQ ID NO: 1041) |
| tSpA | SpCas9WT | dead gRNA + | tSpA-Cas9- | Synthetic 5′- | mG*mG*mC*UGG |
| dead | (SEQ ID | SpCas9 WT | RNP | 3′ 3xPSOMe | CCAACCCAUGU |
| gRNA | NO: 1033) | | | | UUUAGAGCUAG |
| | | | | | AAAUAGCAAGU |
| | | | | | UAAAAUAAGGC |
| | | | | | UAGUCCGUUAU |
| | | | | | CAACUUGAAAA |
| | | | | | AGUGGCACCGA |
| | | | | | GUCGGUGCmU* |
| | | | | | mU*mU*U |
| | | | | | (SEQ ID NO: 1024) |
| SpA | His-NLS- | gRNA + | SpA-D10A- | Synthetic 5′- | mG*mG*mC*AAG |
| gRNA | SpCas9D10A | SpCas9 | RNP | 3′ 3xPSOMe | GCUGGCCAACC |
| | (SEQ ID | nickase | | | CAUGUUUUAGA |
| | NO: 1034) | | | | GCUAGAAAUAG |
| | | | | | CAAGUUAAAAU |
| | | | | | AAGGCUAGUCC |
| | | | | | GUUAUCAACUU |
| | | | | | GAAAAAGUGGC |
| | | | | | ACCGAGUCGGU |
| | | | | | GCmU*mU*mU*U |
| | | | | | (SEQ ID NO: 1025) |
| SpG | His-NLS- | gRNA + | SpG-D10A- | Synthetic 5′- | mU*mA*mG*UCU |
| gRNA | SpCas9D10A | SpCas9 | RNP | 3′ 3xPSOMe | UAGAGUAUCCA |
| | (SEQ ID | nickase | | | GUGGUUUUAGA |
| | NO: 1034) | | | | GCUAGAAAUAG |
| | | | | | CAAGUUAAAAU |
| | | | | | AAGGCUAGUCC |
| | | | | | GUUAUCAACUU |
| | | | | | GAAAAAGUGGC |
| | | | | | ACCGAGUCGGU |
| | | | | | GCmU*mU*mU*U |
| | | | | | (SEQ ID NO: 1026) |
| Sp182 | SpCas9WT | dead gRNA + | Sp182-Cas9- | Synthetic 5′- | mU*mU*mA*GAG |
| dead | (SEQ ID | SpCas9 WT | RNP | 3′ 3xPSOMe | UAUCCAGUGGU |
| gRNA | NO: 1033) | | | | UUUAGAGCUAG |
| | | | | | AAAUAGCAAGU |
| | | | | | UAAAAUAAGGC |
| | | | | | UAGUCCGUUAU |
| | | | | | CAACUUGAAAA |
| | | | | | AGUGGCACCGA |
| | | | | | GUCGGUGCmU* |
| | | | | | mU*mU*U |
| | | | | | (SEQ ID NO: 1027) |

“His” refers to a six-histidine purification sequence
“AsCpf1” refers to the Acidaminococcus sp. Cpf1 protein sequence
“nNLS” refers to the nucleoplasmin NLS, and “sNLS” refers to the SV40 NLS
“SpCas9” refers to the S. Pyogenes Cas9 protein sequence
“*” represents phosphorothioate modification
“PS” represents phosphorothioate modification
“PS2” represents phosphorodithioate modification
“OMe” represents a 2-o-methyl modification
“m” represents a 2-o-methyl modification

TABLE 15
Cpf1 guide RNA targeting sequences

| gRNA | gRNA Targeting | gRNA Targeting domain |
|---|---|---|
| ID | domain sequence (RNA) | sequence (DNA) |
| HBG1-1 | CCUUGUCAAGGCUAUUGGUC | CCTTGTCAAGGCTATTGGTC |
| gRNA | (SEQ ID NO: 1002) | (SEQ ID NO: 1003) |
| Sp182 | UUAGAGUAUCCAGUG | TTAGAGTATCCAGTG |
| dgRNA | (SEQ ID NO: 1028) | (SEQ ID NO: 1029) |
| SpG | UAGUCUUAGAGUAUCCAGUG | TAGTCTTAGAGTATCCAGTG |
| gRNA | (SEQ ID NO: 359) | (SEQ ID NO: 1030) |
| SpA | GGCAAGGCUGGCCAACCCAU | GGCAAGGCTGGCCAACCCAT |
| gRNA | (SEQ ID NO: 941) | (SEQ ID NO: 944) |
| tSpA | GGCUGGCCAACCCAU | GGCTGGCCAACCCAT |
| dgRNA | (SEQ ID NO: 326) | (SEQ ID NO: 1031) |

### Example 15: Cpf1 RNP Editing Efficiency at the CCAAT Box Region of the HBG Promoter is Enhanced when Co-Delivered with S. Pyogenes Cas9 RNP with No Impact on Viability

[0402] It was hypothesized that the co-delivery of Cpf1-RNP with proximally targeting S. Pyogenes Cas9 RNP, either catalytically inactive or introducing single nicks, could enhance editing levels at the target site. In an attempt to enhance Cpf1-RNP mediated editing at the distal CCAAT box region of the HBG promoter, HBG1-1-AsCpf1H800A-RNP (composed of His-AsCpf1-sNLS-sNLS-H800A (SEQ ID NO: 1032) complexed to HBG1-1 gRNA with a 3′ modification as shown in Table 14 (SEQ ID NO:1041) was co-delivered into mPB CD34+ cells with: (1) S. Pyogenes Cas9 D10A RNP containing a Cas9 D10A protein (His-NLS-SpCas9D10A, SEQ ID NO:1034) complexed to a full length guide RNA (100mer) selected from: (a) SpA gRNA (Tables 14, 15; FIG. 27B) (“SpA-D10A-RNP”, Table 14) or (b) SpG gRNA (Tables 14, 15; FIG. 27C) (“SpG-D10A-RNP”, Table 14)); (2) S. Pyogenes WT Cas9 RNP containing a WT Cas9 protein (SpCas9WT, SEQ ID NO:1033) complexed to a truncated dead guide RNA (95mer-with a shortened protospacer region) selected from (a) tSpA dgRNA (Tables 14, 15; FIG. 27E) (“tSpA-Cas9-RNP”, Table 14); (b) Sp182 dgRNA (Tables 14, 15; FIG. 27F) (“Sp182-Cas9-RNP”, Table 14); or (c) tSpA-Cas9-RNP and Sp182-Cas9-RNP (Tables 14, 15, FIG. 27D). The RNP complexes were electroporated using the MaxCyte GT device (MaxCyte, Inc). The level of insertions/deletions at the target site was then analyzed by Illumina sequencing (NGS) of the PCR amplified target site three days after electroporation. In all combinations tested, irrespective of the S. Pyogenes Cas9 enzyme used (D10A or WT) and of PAM orientation, total editing was increased above levels observed following Maxcyte delivery of HBG1-1-AsCpf1H800A-RNP alone (FIG. 29 and Table 16). In addition there was no detrimental effect on viability of mPB CD34+ cells when S. Pyogenes Cas9 RNP were co-delivered (FIG. 30).

TABLE 16
Summary of indels and gamma globin expression with
each RNP combination at the maximum RNP dose tested

| | | | | Gamma Globin |
|---|---|---|---|---|
| | | | Indels | (over total beta- |
| Cpf1 RNP | Cas9 RNP1 | Cas9 RNP2 | (NGS) | like chains) |
| — | — | — | 0% | 13.5% |
| HBG1-1- | — | — | 8.0% | 20.0% |
| AsCpf1H800A- | | | | |
| RNP | | | | |
| HBG1-1- | SpG-D10A- | — | 88.6% | 30.2% |
| AsCpf1H800A- | RNP | | | |
| RNP | | | | |
| HBG1-1- | SpA-D10A- | — | 42.6% | 32.5% |
| AsCpf1H800A- | RNP | | | |
| RNP | | | | |
| HBG1-1- | tSpA-Cas9- | — | 32.2% | 19.8% |
| AsCpf1H800A- | RNP | | | |
| RNP | | | | |
| HBG1-1- | Sp182-Cas9- | — | 85.4% | 42.8% |
| AsCpf1H800A- | RNP | | | |
| RNP | | | | |
| HBG1-1- | tSpA-Cas9- | Sp182-Cas9- | 80.1% | 33.7% |
| AsCpf1H800A- | RNP | RNP | | |
| RNP | | | | |

### Example 16: Cpf1 Editing Profile can be Manipulated with Co-Delivery of S. Pyogenes Cas9-D10A-RNP

[0403] In addition to the increase in total editing observed when HBG1-1-AsCpf1H800A-RNP was co-delivered to mPB CD34+ cells with S. Pyogenes Cas9-D10A-RNP (FIG. 29), changes to the indel profile were also observed. The introduction of a single strand break proximal to the Cpf1-RNP target site by the D10A enzyme (FIG. 31A) altered the directionality, length and/or position of the indels (FIG. 31B). For example, Sp182-D10A-RNP strongly shifted the profile toward the nicking site introduced by the D10A RNP, with deletions of various length extending from the Cpf1 cut site toward the upstream nicking site (Sp182-D10A-RNP, FIG. 31B). While the SpA-D10A-RNP also promoted the generation of deletions extending from the HBG1-1-AsCpf1H800A-RNP cut site to the nicking site introduced by the D10A enzyme (here located downstream), in this case, additional deletions apparently originating from the nicking site, but not extending fully to the HBG1-1-AsCpf1H800A-RNP cut site, were also produced (SpA-D10A-RNP, FIG. 31B).

[0404] It is probable that the orientation, target strand, and distance of the S. Pyogenes Cas9-D10A-RNP target site to the Cpf1-RNP target site leads to differences in the position and length of the mutations promoted by the additional DNA nick (FIG. 31A). It should be noted that in certain applications this directional manipulation of the indel profile, i.e., an increase in the frequency of indels occurring between the Cpf1-RNP and S. Pyogenes Cas9 D10A-RNP binding sites, could be used to favor a desired editing outcome, to increase the rate of productive indels (e.g., indels disrupting a targeted site). In the case set-out within, to disrupt the dCCAAT target region and induce HbF protein expression, the co-delivery of HBG1-1-AsCpf1H800A-RNP with S. Pyogenes D10A-RNP led to an increase of gamma globin levels by 16.7% (SpG-D10A-RNP) or 19.0% (SpA-D10A-RNP) above levels detected in mock electroporated cells, as detected by UPLC analysis after 18 days of erythroid differentiation post electroporation (FIG. 29 and Table. 16). The frequency of productive indels was higher when pairing HBG1-1-AsCpf1H800A-RNP with SpA-D10A-RNP (versus SpG-D10A-RNP) as a higher increase in HbF levels (19% with Cas9D10A-SpA-RNP vs 16.7% with SpG-D10A-RNP) was achieved from a lower editing level (42.6% with SpA-D10A-RNP vs 88.6% with SpG-D10A-RNP) (FIG. 29 and Table 16).

### Example 17: Cpf1 Editing is Increased without Altering the Editing Profile in the Presence of S. Pyogenes Cas9 WT RNP Containing a Dead Guide RNA

[0405] When co-delivering HBG1-1-AsCpf1H800A-RNP (at a fixed dose of 6 μM) to mPB CD34+ cells with increasing doses of Sp182-Cas9-RNP (complexed with a truncated, 95mer dead gRNA, Sp182), using the MaxCyte electroporator device, an editing boost has been observed up to greater than 10-fold (85.4% editing with the highest dose of Sp182-Cas9-RNP versus 8.0% when HBG1-1-AsCpf1H800A-RNP was delivered alone) (FIG. 29). The levels of editing achieved here by co-delivering Sp182-Cas9-RNP also greatly surpassed the levels of editing obtained using the MaxCyte electroporator device when HBG1-1-AsCpf1H800A-RNP was delivered alone at doses as high as 20 μM (FIG. 28B). In contrast to the results observed by co-delivering a D10A-RNP (in Example 16), the increase in editing achieved by co-delivering HBG1-1-AsCpf1H800A-RNP with Sp182-Cas9-RNP (Cas9-WT complexed with a truncated gRNA) was not associated with an apparent impact on the indel profile. The indels detected in electroporated cells were centered around the Cpf1 cut site in an approximal symmetrical fashion and no indels were detected at the Sp182-Cas9-RNP target site (FIG. 32A). Of note, 96% of the total indels were disrupting the distal-CCAAT box, and 79.5% of total indels disrupted 3 or more nucleotides of the CCAAT box motif (FIG. 32B). Further dosing optimization using HBG1-1-AsCpf1H800A-RNP (composed of His-AsCpf1-sNLS-sNLS-H800A (SEQ ID NO:1032) complexed to HBG1-1 gRNA (SEQ ID NO: 1022)) and Sp182-Cas9-RNP enabled editing levels of up to 92% in mPB-CD34+ cells at 120 hours post-electroporation using the MaxCyte device, and lead to gamma chain expression levels 32% above background in erythroid derived cells (41% of gamma chains in treated cells, 8% in mock treated cells) (FIG. 33). Those results demonstrate that an RNP composed of WT S. Pyogenes Cas9 protein complexed with a truncated gRNA can increase the editing from a proximally binding Cpf1-RNP without introducing detectable levels of editing at its own binding site nor noticeably affecting the length nor directionality of indels generated by the Cpf1-RNP. Here, the editing enhancement provided by the Sp182-Cas9-RNP enables high editing of the HBG1-1-AsCpf1H800A-RNP at the HBG promoter, with a high frequency of indels disrupting the distal CCAAT box target motif and leading to therapeutically relevant levels of gamma chain expression in the bulk erythroid progeny of the electroporated cells.

### Example 18: Clonal HbF Distribution within Cell Population Edited with Cpf1 gRNA Targeting the Distal CCAAT Box

[0406] A single cell experiment was next performed to evaluate the distribution of gamma chain expression levels in erythroid cells derived from mPB CD34+ cells electroporated with the HBG1-1-AsCpf1H800A-RNP (composed of His-AsCpf1-sNLS-sNLS-H800A (SEQ ID NO:1032) complexed to HBG1-1 gRNA with a 3′ modification as shown in Table 14 (SEQ ID NO:1041))+Sp182-Cas9-RNP combination (FIG. 27F, Table 14). After being left to recover during 48 hours post-electroporation, the cells were sorted by Fluorescence Activated Cell Sorting (FACS) at 1-cell/well in non-tissue culture treated 384-well plates. The cells were then differentiated and expanded clonally for 18 days into the erythroid lineage (adapted from Giarratana 2011). UPLC analysis was performed to determine the distribution of gamma chain expression levels (percentage of gamma chains/[total beta-like chains]) in the clonal erythroid progeny of cells derived from the total population of mPB-CD34+ cells initially edited. It is considered that in order to achieve a functional benefit and alleviate symptoms associated with sickle cell disease, ˜30% of the erythroid cells should have fetal hemoglobin levels greater than 30%. Of the clones analyzed, 83.1% had gamma chains levels above the median level detected in erythroid clones derived from mock electroporated mPB CD34+ cells (median value=18.8%), 64.2% had gamma chains levels exceeding 30% of total beta-like and 35.8% had gamma chains levels exceeding 48.8% of total beta-like (30%+18.8% median level in control cells) (FIG. 34).

### Example 19: Screen of Cpf1 gRNAs Targeting the HBG Promoter Region

[0407] To identify other AsCpf1 gRNA that could be used as a component of a single RNP or in combination with a “booster element” to increase editing of the HBG promoter region in CD34+ cells and induce fetal globin expression in the erythroid progeny of modified cells, His-AsCpf1-NLS-NLS (“AsCpf1,” SEQ ID NO:1000); AsCpf1 S542R/K607R (“AsCpf1 RR,” SEQ ID NO:1036); or AsCpf1 S542R/K548V/N552R (“AsCpf1 RVR,” SEQ ID NO:1037) gRNA sequences targeting several domains of the HBG promoter (Table 17) were designed (listed in Table 18). AsCpf1 RR and AsCpf1 RVR are engineered AsCpf1 variants which recognize TYCV/ACCC/CCCC and TATV/RATR PAMs, respectively (Gao 2017).

TABLE 17
Subdomains of the HBG genomic region

| Genomic | | |
|---|---|---|
| Coordinate of | | |
| HbG* | Nucleotides | Name of Region |
| Chr 11 | TCCTAAAGCT TGGAACACTT | Region 1: Downstream of HBG1 |
| (NC_000011.10): | TCCCTTCCTT AAGAACCATC | |
| 5,247,883- | CTTGCTACTC AGCTGCAATC | |
| 5,248,186 | AATCCAGCCC CCAGGTCTTC | |
| | ACTGAACCTT TTCCCATCTC | |
| | TTCCAAAACA TCTGTTTCTG | |
| | AGAAGTCCTG TCCTATAGAG | |
| | GTCTTTCTTC CCACCGGATT | |
| | TCTCCTACAC CATTTACTCC | |
| | CACTTGCAGA ACTCCCGTGT | |
| | ACAAGTGTCT TTACTGCTTT | |
| | TATTTGCTCA TCAAAATGCA | |
| | CATCTCATAT AAAAATAAAT | |
| | GAGGAGCATG CACACACCAC | |
| | AAACACAAAC AGGCATGCAG | |
| | AAAT | |
| | (SEQ ID NO: 1118) | |
| Chr 11 | ATAAAGATGA ACCCATAGTG | Region 2: HBG1 Intron 2 - A |
| (NC_000011.10): | AGCTGAGAGC TCCAGCCTGG | |
| 5,248,509- | CCTCCAGATA ACTACACACC | |
| 5,249,173 | AAGCTTCCAC CCAGAATCAA | |
| | GCCTATGTTA ACTTCCCTCA | |
| | AAGCCTGAGA TTTTGCCTTC | |
| | CCATTAAATG CAGGTAGTTG | |
| | TTCCCCTTCA AGCACTAGTC | |
| | ACTGGCCATA ATTTAAATCT | |
| | TGCTATCTTC TTGCCACCAT | |
| | GAACCCTGTA TGTTGTAGGC | |
| | TGAAGACGTT AAAAGAAACA | |
| | CACGCTGACA CACACACACA | |
| | CACGCGCGCG CGCACACACA | |
| | CACACACACA CAGAGCTGAC | |
| | TTTCAAAATC TACTCCAGCC | |
| | CAAATGTTTC AATTGTTCCT | |
| | CACCCCTGGA CATACTTTGC | |
| | CCCCATCTGG AATTAAAGGA | |
| | TATAAGTTTG TAATGAAGCA | |
| | TTAGCAGCAT TTTATATGTG | |
| | TCCAGCTGAT ATAGGAATAG | |
| | CCTTAGCAAT GTATGTTTGG | |
| | CCACCAAAGT TCCCCACTTT | |
| | GACTGAGCCA ATATATGCCT | |
| | TCTGCCTGCA TCTTTTTAAC | |
| | GACCATACTT GTCCTGCCTC | |
| | CAGATAGATG TTTTAAAACA | |
| | ACAAAAATGA GGGAAAGATG | |
| | AAAGTTCTTT CTACTGGAAT | |
| | CTAATAAAGA AAAGTCATTT | |
| | TCCTCATTTC CACCTCTCTT | |
| | TTCTCAAAGT CAAAATTGTC | |
| | CATCT | |
| | (SEQ ID NO: 1119) | |
| Chr 11 | CCCTAAAACA TTACCACTGG | Region 3: HBG1 Intron 2 - B |
| (NC_000011.10): | GTCTCAGCCC AGTTAGTCCT | |
| 5,249,198- | CTGCAGTTTC TTCACCCCCA | |
| 5,249,362 | ACCCCAGTAT CTTCAAACAG | |
| | CTCACACCCT GCTGTGCTCA | |
| | GATCAATACT CCGTTGTCTA | |
| | AGTTGCCTCG AGACTAAAGG | |
| | CAACAGGGCT GAAACATCTC | |
| | CTGGA | |
| | (SEQ ID NO: 1120) | |
| Chr 11 | CTGTGAGATT GACAAGAACA | Region 4: HBG1 Intron 1 |
| (NC_000011.10): | GTTTGACAGT CAGAAGGTGC | |
| 5,249,591- | CACAAATCCT GAGAAGCGAC | |
| 5,249,712 | CTGGACTTTT GCCAGGCACA | |
| | GGGTCCTTCC TTCCCTCCCT | |
| | TGTCCTGGTC ACCAGAGCCT | |
| | AC | |
| | (SEQ ID NO: 1121) | |
| Chr 11 | GCCGCCGGCC CCTGGCCTCA | Region 5: HBG1 -60 nt region |
| (NC_000011.10): | CTGG | from Transcription Start Site |
| 5,249,904- | (SEQ ID NO: 1122) | (TSS) |
| 5,249,927 | | |
| Chr 11 | CCTTGTCAAG GCTATTGGTC | Region 6: HBG1 -110 nt region |
| (NC_000011.10): | AAGGCAAGGC TGG | from TSS |
| 5,249,955- | (SEQ ID NO: 1123) | |
| 5,249,987 | | |
| Chr 11 | TGAGATAGTG TGGGGAAGGG | Region 7: HBG1 -200 nt region |
| (NC_000011.10): | GCCCCC AAGAGGATAC | from TSS |
| 5,250,040- | (SEQ ID NO: 1124) | |
| 5,250,075 | | |
| Chr 11 | TATAGCCTTT GCCTTGTTCC | Region 8: HBG1 -250 nt region |
| (NC_000011.10): | GATTCAGTCA TTCCAGTTTT | from TSS |
| 5,250,089- | T | |
| 5,250,129 | (SEQ ID NO: 1125) | |
| Chr 11 | TCTTCCCTTT AGCTAGTTTC | Region 9: HBG1 -333 nt region |
| (NC_000011.10): | CTTCTCCCAT CATAGAGGAT | from TSS |
| 5,250,141- | ACCAGGACTT CTTTTGTCAG | |
| 5,250,254 | CCGTTTTTTA CCTTCTTGTC | |
| | TCTAGCTCCA GTGAGGCCTG | |
| | TAGTTTAAAG CTAA | |
| | (SEQ ID NO: 1126) | |
| Chr 11 | CCACAGTTTC AGCGCAGTAA | Region 10: HBG1 -650 nt region |
| (NC_000011.10): | TAGATTAGTG TTACATAATA | from TSS |
| 5,250,464- | TAAGACCTAA TGCTTACCTC | |
| 5,250,549 | AATATCTACT TATCCGTACC | |
| | TATTTG | |
| | (SEQ ID NO: 1127) | |
| Chr 11 | TATTCAGGTA TGTATGTATA | Region 11: HBG1 -800 nt region |
| (NC_000011.10): | CACCAGATGA TGTGTATTTA | from TSS |
| 5,250,594- | CCACTGGATA AGTGTGTGTG | |
| 5,250,735 | CTGGCTGATG ACCCAGGGTT | |
| | TTGGCGTAGC TCTTCTATGC | |
| | TCAGTAAAGA TGATGGTAGA | |
| | ATGTTCTTTG GCAGGTACTG | |
| | TG | |
| | (SEQ ID NO: 1128) | |
| Chr 11 | CAATAAAGAT GAACCCATAG | Region 12: HBG2 Intron 2 - A |
| (NC_000011.10): | TGAGCTGAGA GCTCCAGCCT | |
| 5,253,425- | GGCCTCCAGA TAACTACACA | |
| 5,254,121 | CCAAGCTTCC ACCCAGAATC | |
| | AAGCCTATGT TAACTTCCCT | |
| | CAAAGCCTGA GATTTTGCTT | |
| | TCCCATTAAA TGCAGGTAGT | |
| | TGTTCTTCTT GCAGCACTAG | |
| | TCACTGGCCA TAATTTAAAT | |
| | CTTGTTATCT TCTTGCCACC | |
| | ATGAACCCTG TATGCTGTAG | |
| | GCTGAAAACG TTAAAAGAAA | |
| | CACACGCTCT CACACACACA | |
| | CAAACACACG CGCGCACACA | |
| | CACACACACA CACACAGAGC | |
| | TGACTTTCAA AATCTACTCC | |
| | AGCCCAAATG TTTCAATTGT | |
| | TCCTCACCCC TGGACATACT | |
| | TTGCCCCCAT CTGGAATTAA | |
| | AGGATATAAG TTTGTAATGA | |
| | AGCATTAGCA GCATTTTATA | |
| | TGTGTCCAGC TGATATAGGA | |
| | ATAGCCTTAG CAATGTATGT | |
| | TTGGCCACCA AAGTTCCCCA | |
| | CTTTGACTGA GCCAATATAT | |
| | GCCTTCTGCC TGCATCTTTT | |
| | TAATGACCAT ACTTGTCCTG | |
| | CCTCCAGATA GATGTTTTAA | |
| | AACGAATAAC AAAAATAGGG | |
| | GAAAGGTGAA AGTTCTTTCT | |
| | ACCGAAATCT AATAAAGAAA | |
| | AGTCATTTTC CTCATTTCCA | |
| | CCTCTCTTTT CTCAAAGTCA | |
| | AAGTTGTCCA TCTAGATTTT | |
| | CAGAGGCACT CCTTAGG | |
| | (SEQ ID NO: 1129) | |
| Chr 11 | CCCTAAAACA TTGCCACTGG | Region 13: HBG2 Intron 2 - B |
| (NC_000011.10): | GTCTCAGCCC AGTTAGTCCT | |
| 5,254,122- | CTGCAGTTTC TTCACTCCCA | |
| 5,254,306 | ACCCCAGTAT CTTCAAACAG | |
| | CTCACACCCT GCTGTGCTCA | |
| | GATCAATACT CAGTTGTCTA | |
| | AGTTGCCTCG AGACTAAAGG | |
| | CAACAGTGCT GAAACATCTC | |
| | CTGGACTCAC CTTGAAGTTC | |
| | TCAGG | |
| | (SEQ ID NO: 1130) | |
| Chr 11 | AGCCTGTGAG ATTGACAAGA | Region 14: HBG2 Intron 1 |
| (NC_000011.10): | ACAGTTTGAC AGTCAGAAGG | |
| 5,254,511- | TGCCACAAAT CCTGAGAAGC | |
| 5,254,648 | GACCTGGACT TTTGCCAGGC | |
| | ACAGGGTCCT TCCTTCCCTC | |
| | CCTTGTCCTG GTCACCAGAG | |
| | CCTACCTTCC CAGGGTT | |
| | (SEQ ID NO: 1131) | |
| Chr 11 | CCGCCGGCCC CTGGCCTCAC | Region 15: HBG2 -60 nt region |
| (NC_000011.10): | TGGATACTCT AAGACTAT | from TSS |
| 5,254,829- | (SEQ ID NO: 1132) | |
| 5,254,866 | | |
| Chr 11 | CCTTGTCAAG GCTATTGGTC | Region 16: HBG2 -110 nt region |
| (NC_000011.10): | AAGGCAAGGC T | from TSS |
| 5,254,879- | (SEQ ID NO: 1133) | |
| 5,254,909 | | |
| Chr 11 | CAGGGACCGT TTCAGACAGA | Region 17: HBG2 -200 nt region |
| (NC_000011.10): | TATTTGCATT GAGATAGTGT | from TSS |
| 5,254,935 | GGGGAAGGGG CCCCCAAGAG | |
| 5,255,009 | GATACTGCTG CTTAA | |
| | (SEQ ID NO: 1134) | |
| Chr 11 | TTGCCTTGTT CCGATTCAGT | Region 18: HBG2 -250 nt region |
| (NC_000011.10): | CATTCCAAT | from TSS |
| 5,255,025- | (SEQ ID NO: 1135) | |
| 5,255,053 | | |
| Chr 11 | TTTAGCTAGT TTTCTTCTCC | Region 19: HBG2 -330 nt region |
| (NC_000011.10): | CACCATAGAA GATACCAGGA | from TSS |
| 5,255,076- | CTTCTTTTGT CAGCCGTTTT | |
| 5,255,179 | TCACCTTCTT GTCTGTAGCT | |
| | CCAGTGAGGC CTGTAGTTTA | |
| | AAGT | |
| | (SEQ ID NO: 1136) | |
| Chr 11 | GGACACGTCT TAGTCTCATT | Region 20: HBG2 -500 nt region |
| (NC_000011.10): | TAGTAAGCAT TGGTTTCC | from TSS |
| 5,255,255- | (SEQ ID NO: 1137) | |
| 5,255,292 | | |
| Chr 11 | TTTTTTATAT TCAGGTATGT | Region 21: HBG2 -800 nt region |
| (NC_000011.10): | ATGTAGGCAC CCGATGATGT | from TSS |
| 5,255,518- | GTATTTATCA CTGGATAAGT | |
| 5,255,641 | GTATGTGCTG GCTGATGACC | |
| | CAGGGTTTTG GTGTAGCTCT | |
| | TCTATGCTCG GTAAAGATGA | |
| | TGGT | |
| | (SEQ ID NO: 1138) | |

*NCBI Reference Sequence NC_000011, the coordinates are reported using the One-based coordinate system, “Homo sapiens chromosome 11, GRCh38.p12 Primary Assembly,” (Version NC_000011.10).

TABLE 18
Cpf1 guide RNAs

| gRNA | | | | | | |
|---|---|---|---|---|---|---|
| targeting | gRNA Targeting | gRNA Targeting | Genomic | Genomic | | |
| domain | domain | domain | coordinates | coordinates | % | |
| sequence ID* | sequence (RNA) | sequence (DNA) | at HbG1** | at HbG2** | Editing | Strand |
| AsCpf1 HBG1 | AGACAGAUAU | AGACAGATAT | Chr11:525002 | Chr11:52549 | 5.43 | + |
| Promoter-1 | UUGCAUUGAG | TTGCATTGAG | 4:5250043 | 48:5254967 | | |
| | (SEQ ID | (SEQ ID | | | | |
| | NO: 1139) | NO: 1140) | | | | |
| AsCpf1 HBG1 | CAUUGAGAUA | CATTGAGATA | Chr11:525003 | Chr11:52549 | 8.30 | + |
| Promoter-2 | GUGUGGGGA | GTGTGGGGAA | 7:5250056 | 61:5254980 | | |
| | A (SEQ ID | (SEQ ID | | | | |
| | NO: 1141) | NO: 1142) | | | | |
| AsCpf1 HBG1 | UAGCCUUUGC | TAGCCTTTGC | Chr11:525009 | Chr11:52550 | 0.23 | + |
| Promoter-3 | CUUGUUCCGA | CTTGTTCCGA | 1:5250110 | 19:5255038 | | |
| | (SEQ ID | (SEQ ID | | | | |
| | NO: 1143) | NO: 1144) | | | | |
| AsCpf1 HBG1 | CCUUGUUCCG | CCTTGTTCCG | Chr11:525010 | Chr11:52550 | 1.15 | + |
| Promoter-4 | AUUCAGUCAU | ATTCAGTCAT | 0:5250119 | 28:5255047 | | |
| | (SEQ ID | (SEQ ID | | | | |
| | NO: 1145) | NO: 1146) | | | | |
| AsCpf1 HBG1 | UCUAAUUUAU | TCTAATTTATT | Chr11:525013 | Chr11:52550 | 0.16 | + |
| Promoter-5 | UCUUCCCUUU | CTTCCCTTT | 1:5250150 | 59:5255078 | | |
| | (SEQ ID | (SEQ ID | | | | |
| | NO: 1147) | NO: 1148) | | | | |
| AsCpf1 HBG1 | CUUCUCCCAU | CTTCTCCCATC | Chr11:525016 | | 12.73 | + |
| Promoter-6 | CAUAGAGGAU | ATAGAGGAT | 1:5250180 | | | |
| | (SEQ ID | (SEQ ID | | | | |
| | NO: 1149) | NO: 1150) | | | | |
| AsCpf1 HBG2 | UUCUCCCACC | TTCTCCCACC | | Chr11:52550 | 8.11 | + |
| Promoter-7 | AUAGAAGAU | ATAGAAGATA | | 90:5255109 | | |
| | A (SEQ ID | (SEQ ID | | | | |
| | NO: 1151) | NO: 1152) | | | | |
| AsCpf1 HBG1 | CCACUGGAUA | CCACTGGATA | Chr11:525063 | | 13.33 | + |
| Promoter-8 | AGUGUGUGU | AGTGTGTGTG | 4:5250653 | | | |
| | G (SEQ ID | (SEQ ID | | | | |
| | NO: 1153) | NO: 1154) | | | | |
| AsCpf1 HBG1 | GCGUAGCUCU | GCGTAGCTCT | Chr11:525067 | | 13.48 | + |
| Promoter-9 | UCUAUGCUCA | TCTATGCTCA | 7:5250696 | | | |
| | (SEQ ID | (SEQ ID | | | | |
| | NO: 1155) | NO: 1156) | | | | |
| AsCpf1 HBG1 | CUGAGCAUAG | CTGAGCATAG | Chr11:525067 | | 10.73 | − |
| Promoter-10 | AAGAGCUACG | AAGAGCTACG | 8:5250697 | | | |
| | (SEQ ID | (SEQ ID | | | | |
| | NO: 1157) | NO: 1158) | | | | |
| AsCpf1 HBG2 | UCACUGGAUA | TCACTGGATA | | Chr11:52555 | 0.43 | + |
| Promoter-11 | AGUGUAUGU | AGTGTATGTG | | 65:5255584 | | |
| | G (SEQ ID | (SEQ ID | | | | |
| | NO: 1159) | NO: 1160) | | | | |
| AsCpf1 HBG2 | GUGUAGCUCU | GTGTAGCTCT | | Chr11:52556 | 5.78 | + |
| Promoter-12 | UCUAUGCUCG | TCTATGCTCG | | 08:5255627 | | |
| | (SEQ ID | (SEQ ID | | | | |
| | NO: 1161) | NO: 1162) | | | | |
| AsCpf1 HBG2 | CCGAGCAUAG | CCGAGCATAG | | Chr11:52556 | 3.24 | − |
| Promoter-13 | AAGAGCUACA | AAGAGCTACA | | 09:5255628 | | |
| | (SEQ ID | (SEQ ID | | | | |
| | NO: 1163) | NO: 1164) | | | | |
| HBG1-1 | CCUUGUCAAG | CCTTGTCAAG | Chr11:524995 | Chr11:52548 | 17.96 | + |
| AsCpf1 | GCUAUUGGUC | GCTATTGGTC | 5:5249974 | 79:5254898 | | |
| | (SEQ ID | (SEQ ID | | | | |
| | NO: 1002) | NO: 1003) | | | | |
| AsCpf1 RR | GACAGAUAUU | GACAGATATT | Chr11:525002 | Chr11:52549 | 8.48 | + |
| HBG1 | UGCAUUGAGA | TGCATTGAGA | 5:5250044 | 49:5254968 | | |
| Promoter-1 | (SEQ ID | (SEQ ID | | | | |
| | NO: 1167) | NO: 1168) | | | | |
| AsCpf1 RR | ACACUAUCUC | ACACTATCTC | Chr11:525003 | Chr11:52549 | 0.09 | − |
| HBG1 | AAUGCAAAUA | AATGCAAATA | 1:5250050 | 55:5254974 | | |
| Promoter-2 | (SEQ ID | (SEQ ID | | | | |
| | NO: 1169) | NO: 1170) | | | | |
| AsCpf1 RR | CACACUAUCU | CACACTATCT | Chr11:525003 | Chr11:52549 | 2.10 | − |
| HBG1 | CAAUGCAAAU | CAATGCAAAT | 2:5250051 | 56:5254975 | | |
| Promoter-3 | (SEQ ID | (SEQ ID | | | | |
| | NO: 1171) | NO: 1172) | | | | |
| AsCpf1 RR | CCACACUAUC | CCACACTATC | Chr11:525003 | Chr11:52549 | 2.52 | − |
| HBG1 | UCAAUGCAAA | TCAATGCAAA | 3:5250052 | 57:5254976 | | |
| Promoter-4 | (SEQ ID | (SEQ ID | | | | |
| | NO: 1173) | NO: 1174) | | | | |
| AsCpf1 RR | UUCCCCACAC | TTCCCCACAC | Chr11:525003 | Chr11:52549 | 0.05 | − |
| HBG1 | UAUCUCAAUG | TATCTCAATG | 7:5250056 | 61:5254980 | | |
| Promoter-5 | (SEQ ID | (SEQ ID | | | | |
| | NO: 1175) | NO: 1176) | | | | |
| AsCpf1 RR | GAUUCAGUCA | GATTCAGTCA | Chr11:525010 | | 0.77 | + |
| HBG1 | UUCCAGUUUU | TTCCAGTTTT | 9:5250128 | | | |
| Promoter-6 | (SEQ ID | (SEQ ID | | | | |
| | NO: 1177) | NO: 1178) | | | | |
| AsCpf1 RR | AUUCAGUCAU | ATTCAGTCAT | Chr11:525011 | | 0.24 | + |
| HBG1 | UCCAGUUUUU | TCCAGTTTTT | 0:5250129 | | | |
| Promoter-7 | (SEQ ID | (SEQ ID | | | | |
| | NO: 1179) | NO: 1180) | | | | |
| AsCpf1 RR | GUCAUUCCAG | GTCATTCCAG | Chr11:525011 | | 1.00 | + |
| HBG1 | UUUUUCUCUA | TTTTTCTCTA | 5:5250134 | | | |
| Promoter-8 | (SEQ ID | (SEQ ID | | | | |
| | NO: 1181) | NO: 1182) | | | | |
| AsCpf1 RR | AGUUUUUCUC | AGTTTTTCTCT | Chr11:525012 | | 0.15 | + |
| HBG1 | UAAUUUAUUC | AATTTATTC | 3:5250142 | | | |
| Promoter-9 | (SEQ ID | (SEQ ID | | | | |
| | NO: 1183) | NO: 1184) | | | | |
| AsCpf1 RR | GUUUUUCUCU | GTTTTTCTCTA | Chr11:525012 | | 0.15 | + |
| HBG1 | AAUUUAUUCU | ATTTATTCT | 4:5250143 | | | |
| Promoter-10 | (SEQ ID | (SEQ ID | | | | |
| | NO: 1185) | NO: 1186) | | | | |
| AsCpf1 RR | GAUUCAGUCA | CAAGAGGATA | | Chr11:52549 | *** | + |
| HBG2 | UUCCAAUUUU | CTGCTGCTTA | | 89:5255008 | | |
| Promoter-11 | (SEQ ID | (SEQ ID | | | | |
| | NO: 1187) | NO: 1188) | | | | |
| AsCpf1 RR | AUUCAGUCAU | AAGAGGATAC | | Chr11:52549 | *** | + |
| HBG2 | UCCAAUUUUU | TGCTGCTTAA | | 90:5255009 | | |
| Promoter-12 | (SEQ ID | (SEQ ID | | | | |
| | NO: 1189) | NO: 1190) | | | | |
| AsCpf1 RR | GUCAUUCCAA | GATTCAGTCA | | Chr11:52550 | 0.25 | + |
| HBG2 | UUUUUCUCUA | TTCCAATTTT | | 37:5255056 | | |
| Promoter-13 | (SEQ ID | (SEQ ID | | | | |
| | NO: 1191) | NO: 1192) | | | | |
| AsCpf1 RR | AAUUUUUCUC | ATTCAGTCAT | | Chr11:52550 | 0.13 | + |
| HBG2 | UAAUUUAUUC | TCCAATTTTT | | 38:5255057 | | |
| Promoter-14 | (SEQ ID | (SEQ ID | | | | |
| | NO: 1193) | NO: 1194) | | | | |
| AsCpf1 RR | AUUUUUCUCU | GTCATTCCAA | | Chr11:52550 | 0.32 | + |
| HBG2 | AAUUUAUUCU | TTTTTCTCTA | | 43:5255062 | | |
| Promoter-15 | (SEQ ID | (SEQ ID | | | | |
| | NO: 1195) | NO: 1196) | | | | |
| AsCpf1 RR | UUCUCCCAUC | AATTTTTCTCT | | Chr11:52550 | 0.14 | + |
| HBG2 | AUAGAGGAU | AATTTATTC | | 51:5255070 | | |
| Promoter-16 | A (SEQ ID | (SEQ ID | | | | |
| | NO: 1197) | NO: 1198) | | | | |
| AsCpf1 RR | AUCAUAGAGG | ATTTTTCTCTA | | Chr11:52550 | 0.10 | + |
| HBG2 | AUACCAGGAC | ATTTATTCT | | 52:5255071 | | |
| Promoter-17 | (SEQ ID | (SEQ ID | | | | |
| | NO: 1199) | NO: 1200) | | | | |
| AsCpf1 RR | ACCAUAGAAG | TTCTCCCATC | Chr11:525016 | | 1.40 | + |
| HBG1 | AUACCAGGAC | ATAGAGGATA | 2:5250181 | | | |
| Promoter-18 | (SEQ ID | (SEQ ID | | | | |
| | NO: 1201) | NO: 1202) | | | | |
| AsCpf1 RR | CAGUACCUGC | ATCATAGAGG | Chr11:525016 | | 7.88 | + |
| HBG1 | CAAAGAACAU | ATACCAGGAC | 9:5250188 | | | |
| Promoter-19 | (SEQ ID | (SEQ ID | | | | |
| | NO: 1203) | NO: 1204) | | | | |
| AsCpf1 RR | UAGUAUCUGG | ACCATAGAAG | | Chr11:52550 | 13.03 | + |
| HBG2 | UAAAGAGCAU | ATACCAGGAC | | 97:5255116 | | |
| Promoter-20 | (SEQ ID | (SEQ ID | | | | |
| | NO: 1205) | NO: 1206) | | | | |
| AsCpf1 RR | UCAAUGCAAA | CAGTACCTGC | Chr11:525071 | | 13.31 | − |
| HBG1 | UAUCUGUCUG | CAAAGAACAT | 4:5250733 | | | |
| Promoter-21 | (SEQ ID | (SEQ ID | | | | |
| | NO: 1207) | NO: 1208) | | | | |
| AsCpf1 RR | CUCUUGGGGG | TAGTATCTGG | | Chr11:52556 | 4.07 | − |
| HBG2 | CCCCUUCCCC | TAAAGAGCAT | | 45:5255664 | | |
| Promoter-22 | (SEQ ID | (SEQ ID | | | | |
| | NO: 1209) | NO: 1210) | | | | |
| AsCpf1 RVR | GAUUCAGUCA | TCAATGCAAA | Chr11:525002 | Chr11:52549 | 0.15 | − |
| HBG1 | UUCCAAUUUU | TATCTGTCTG | 3:5250042 | 47:5254966 | | |
| Promoter-1 | (SEQ ID | (SEQ ID | | | | |
| | NO: 1211) | NO: 1212) | | | | |
| AsCpf1 RVR | AUUCAGUCAU | CTCTTGGGGG | Chr11:525005 | Chr11:52549 | 1.09 | − |
| HBG1 | UCCAAUUUUU | CCCCTTCCCC | 1:5250070 | 75:5254994 | | |
| Promoter-2 | (SEQ ID | (SEQ ID | | | | |
| | NO: 1213) | NO: 1214) | | | | |
| AsCpf1 RVR | AAAAAAAUU | AAAAAAATTA | Chr11:525006 | | *** | − |
| HBG1 | AGCAGUAUCC | GCAGTATCCT | 9:5250088 | | | |
| Promoter-3 | U (SEQ ID | (SEQ ID | | | | |
| | NO: 1215) | NO: 1216) | | | | |
| AsCpf1 RVR | GCCUUUGCCU | GCCTTTGCCTT | Chr11:525009 | Chr11:52550 | 3.96 | + |
| HBG1 | UGUUCCGAUU | GTTCCGATT | 3:5250112 | 21:5255040 | | |
| Promoter-4 | (SEQ ID | (SEQ ID | | | | |
| | NO: 1217) | NO: 1218) | | | | |
| AsCpf1 RVR | AAAAAAAUU | AAAAAAATTA | | Chr11:52549 | *** | − |
| HBG2 | AAGCAGCAGU | AGCAGCAGTA | | 97:5255016 | | |
| Promoter-5 | A (SEQ ID | (SEQ ID | | | | |
| | NO: 1219) | NO: 1220) | | | | |
| AsCpf1 RVR | CUCAGUAAAG | CTCAGTAAAG | Chr11:525069 | | 5.32 | + |
| HBG1 | AUGAUGGUA | ATGATGGTAG | 3:5250712 | | | |
| Promoter-6 | G (SEQ ID | (SEQ ID | | | | |
| | NO: 1221) | NO: 1222) | | | | |
| AsCpf1 RVR | ACUGGAUAAG | ACTGGATAAG | | Chr11:52555 | 9.78 | + |
| HBG2 | UGUAUGUGCU | TGTATGTGCT | | 67:5255586 | | |
| Promoter-7 | (SEQ ID | (SEQ ID | | | | |
| | NO: 1223) | NO: 1224) | | | | |
| AsCpf1 RVR | UGCUGGCUGA | TGCTGGCTGA | Chr11:525065 | Chr11:52555 | 0.24 | + |
| HBG2 | UGACCCAGGG | TGACCCAGGG | 2:5250671 | 83:5255602 | | |
| Promoter-8 | (SEQ ID | (SEQ ID | | | | |
| | NO: 1225) | NO: 1226) | | | | |
| AsCpf1 RVR | CUCGGUAAAG | CTCGGTAAAG | | Chr11:52556 | 5.75 | + |
| HBG2 | AUGAUGGUA | ATGATGGTAG | | 24:5255643 | | |
| Promoter-9 | G (SEQ ID | (SEQ ID | | | | |
| | NO: 1227) | NO: 1228) | | | | |
| AsCpf1 RVR | UGGUAAAGA | TGGTAAAGAG | | Chr11:52556 | 8.55 | − |
| HBG2 | GCAUUCUACC | CATTCTACCA | | 38:5255657 | | |
| Promoter-10 | A (SEQ ID | (SEQ ID | | | | |
| | NO: 1229) | NO: 1230) | | | | |

*the gRNA ID name provides the particular Cpf1 molecule used in the RNP complex
**NCBI Reference Sequence NC_000011, the coordinates are reported using the One-based coordinate system, “Homo sapiens chromosome 11, GRCh38.p12 Primary Assembly,” (Version NC_000011.10).
***represents gRNAs that were not tested.

[0408] RNPs (5 μM) containing AsCpf1 protein (SEQ ID NO:1000), AsCpf1 RR protein (SEQ ID NO: 1036), or AsCpf1 RVR (SEQ ID NO:1037) complexed with single gRNAs comprising gRNA targeting domains from Table 18 (see gRNA ID name for the particular Cpf1 molecule used) were delivered to mobilized peripheral blood (mPB) CD34+ cells using the Amaxa electroporator device (Lonza). After 72 hours, genomic DNA was extracted from cells and the level of insertions/deletions at the target site was then analyzed by Illumina sequencing (NGS) of the PCR amplified target site. The percentage of editing (indels=deletions and insertions) for each gRNA is shown in Table 18 above. In certain embodiments, Cpf1 RNPs comprising one or more of the gRNAs set forth in Table 18 may be used to target the regions listed in Table 17 to induce HbF expression and may be co-delivered with a “booster element” to achieve higher editing levels compared to the editing level of the Cpf1 RNP alone.

### Example 20: Co-Delivery of HBG1-1-Cpf1 RNP Targeting the CCAAT Box with ssODN Supports an Increase in Gene Editing in Human Hematopoietic Stem/Progenitor Cells

[0409] Having demonstrated that a 100 nt ssODN (50/50 homology) donor template encoding the “4 nt deletion” (HBGΔ-112:-115) co-delivered with Cas9 RNP generated a comparable outcome to the longer 180 nt templates (Example 10 and FIG. 23), a 100 nt ssODN generating the “18 nt deletion” (HBG Δ-104:-121) (i.e., ssODN OLI16431 (SEQ ID NO:1040), Table 11) was co-delivered with Cpf1 RNP to further investigate the editing outcome.

[0410] Briefly, human adult mPB CD34+ cells pre-stimulated for two days in medium supplemented with human cytokines were electroporated with RNP comprising the His-AsCpf1-sNLS-sNLS H800A protein (SEQ ID NO:1032, Table 14) complexed to modified HBG1-1 gRNA (SEQ ID NO:1041, Table 14) (“His-AsCpf1-sNLS-sNLS H800A_HBG1-1 RNP”) either alone at 6 μM or in combination with OLI16431 (0.5-6 μM). Co-delivery of the RNP and ssODN donor encoding the 18 nt deletion with positive strand homology arms (OLI16431) enhanced the editing frequency from 8.0% without donor to 75.6%, as determined by sequencing analysis of the HBG PCR product from genomic DNA extracted at 72 hours post-electroporation (FIG. 35A). This level of editing enabled an increase in HbF levels of ˜24% above background (FIG. 35A). Additionally, it should be noted that there was no decrease observed in cell viability (FIG. 35B) as measured by DAPI exclusion or of colony forming potential (FIG. 35C) at any of the doses tested.

### Example 21: Optimization of HBG1-1-Cpf1 RNP and OLI16431 Dosing to Maximize Editing at the RNP Targeting Distal CCAAT Box Site

[0411] Having demonstrated increased editing when co-delivering ssODN with RNP (Examples 9-11, 13, 20), the same methodology was used to optimize the dosing of each component in order to maximize total editing. Briefly, a dosing matrix was set up with RNP comprising the His-AsCpf1-sNLS-sNLS H800A protein (SEQ ID NO:1032, Table 14) complexed to unmodified HBG1-1 gRNA (SEQ ID NO: 1022, Table 14) (“His-AsCpf1-sNLS-sNLS H800A_HBG1-1 RNP”) being co-delivered at 0-12 μM with OLI16431 (SEQ ID NO:1040, Table 11) at 0-12 μM. Using a dose of 8 μM His-AsCpf1-SNLS-SNLS H800A_HBG1-1 RNP co-delivered with 8 μM OLI16431, a maximum of 89.4% indels was achieved when measured by sequencing analysis of the HBG PCR product from genomic DNA extracted from cells following 14 days erythroid culture (FIG. 36A). This coincided with an increase in HbF levels to >32% above background under these dosing conditions (FIG. 36A). The viability of this sample (His-AsCpf1-sNLS-sNLS H800A_HBG1-1 RNP [8 μM]+OLI16431 [8 μM]) was comparable to that of the untreated control sample at both 48 hours post electroporation and after 14 days in erythroid culture (FIG. 36B).

[0412] However, as eluded to in Example 13, an artifact was observed when >8 μM OLI16431 was electroporated into the cells alone, without RNP. Under these conditions, there was a false positive result when PCR amplification was performed 48 hour post electroporation, likely due to excessive ssODN within the system (see FIG. 36A, 8 μM and 12 μM for OLI16431 alone at 48 hours (black bars)). At lower doses of ssODN, and at later timepoints, this false positive was no longer apparent (FIG. 36A, 4 μM and 6 μM for OLI16431 alone at 48 hours (black bars) and 4 μM, 6 μM, 8 μM, and 12 μM for OLI16431 alone at 14 days (light grey bars)). In addition, the decrease in cell viability observed with the ssODN alone groups (FIG. 36B, dropping to ˜57% with 12 μM OLI16431 alone at 48 hours (black bars)) may be a compounding factor. That there was no false positive result at ssODN doses of 4 μM and 6 μM suggests that this artifact may be due to excessive ssODN. These factors, along with the baseline HbF levels observed with the 8 μM and 12 μM OLI16431 alone groups (FIG. 36A, grey dots as compared to negative control), provide confidence that the substantial and sustained boost in RNP editing with the addition of ssODN is real and not an artifact.

### Example 22: RNPs Containing Various Cpf1 and gRNA Targeting the HBG Promoter Region Support Gene Editing in Human Hematopoietic Stem/Progenitor Cells which Promotes Induction of HbF Protein Expression in the Erythroid Progeny

[0413] Guide RNAs comprising SEQ ID NOs: 1022, 1023, 1041-1093, 1098-1106 (Table 19) were complexed to various Cpf1 variant enzymes (SEQ ID NOs: 1032, 1094-1097, 1107-1109, Table 20) to form various RNP complexes (Table 21). The RNPs contained gRNAs with modifications to the 5′ end and/or modifications to the 3′ end of the gRNA (Table 19). Guide RNAs comprising SEQ ID NOs: 1022, 1023, 1041-1084, 1098-1106 (Table 19) have the same expected cleavage site at the distal CCAAT box target region, the related targeting domains contain the sequences set forth in SEQ ID NO:1002 (HBG1-1), SEQ ID NO:1254 (HBG1-1-21mer), SEQ ID NO:1256 (HBG1-1-22mer), SEQ ID NO:1258 (HBG1-1-23mer), for gRNA comprising a 20 mer, 21 mer, 22 mer, or 23 mer protospacer sequence respectively (Table 22, Table 23). In some cases gRNA targeting other positions within the HBG promoter were also tested, including guide RNAs SEQ ID NOs: 1085-1096, comprising targeting domains containing the sequences set forth in SEQ ID NOs: 1260 (AsCpf1 HBG1 Promoter-1 (21mer)), SEQ ID NO: 1262 (AsCpf1 HBG1 Promoter-2 (21mer)) or SEQ ID NO:1264 (AsCpf1 HBG1 Promoter-6 (21mer)) (Table 22, Table 23). Table 21 provides a listing of each RNP tested in Examples 22-24 and the SEQ ID NO of the gRNA and the SEQ ID NO of the Cpf1 variant that form each RNP complex. Additional information about each gRNA and Cpf1 variant may be found in Table 19 and Table 20, respectively.

[0414] The gRNAs used in Examples 22 and 23 were chemically synthesized. Chemicals for oligonucleotide synthesis were purchased from BioAutomation, Glen Research, Millipore Sigma, Sigma-Aldrich, ChemGenes, and Thermo Fisher Scientific. The solid support used for synthesis was either a Unylinker 2000 Å CPG resin, a 2′-TBDMS rU 2000 Å CPG resin or a 2′-O-methyl adenosine (N-Bz) Icaa 2000 Å CPG resin from ChemGenes. RNA (TBDMS-protected) and DNA phosphoramidites were obtained from Thermo Fisher Scientific. In certain embodiments, phosphorothioates were introduced during a sulfurization step with a solution of DDTT (3-((dimethylamino-methylidene) amino)-3H-1,2,4-dithiazole-3-thione) from Glen Research. Oligonucleotides were synthesized using standard RNA and DNA phosphoramidite chemistry on either a BioAutomation MerMade 12 synthesizer or on a GE Äkta OligoPilot 100 synthesizer. Following synthesis, the oligonucleotides were cleaved from the solid support and deprotected in a two-step process using ammonium hydroxide/methylamine and TEA-3HF. After desalting, the oligonucleotides were purified using reversed-phase chromatography on a preparative HPLC.

[0415] First, the effect of editing using RNPs comprising gRNAs with modifications to the 5′ end of the gRNAs was tested. Briefly, RNP complexes (6.0 μM and 12 μM) were delivered to 1×10⁶ mPB CD34+ cells via MaxCyte electroporation, following 48 hours pre-stimulation in X-Vivo 10 media supplemented with SCF, TPO and FLT3. The level of insertions/deletions at the target site was analyzed by Illumina sequencing (NGS) of the PCR amplified target site at 72 hours after electroporation. Results demonstrate that RNPs comprising gRNAs with no modification (RNP33, also referred to as “HBG1-1-AsCpf1 RNP,” Table 14) or modifications to the 5′ end of the gRNA including the addition of 5 nt RNA (RNP37), 10 nt RNA (RNP38), 25 nt RNA (RNP39), 60 nt RNA (RNP40), 5 nt DNA (RNP41), 10 nt DNA (RNP42), 25 nt DNA (RNP43), and 60 nt DNA (RNP44) (Table 21) supports on-target editing (FIG. 37).

[0416] Next, the effect of co-delivery of Cpf1 RNP with Sp182 dead RNP (dead gRNA comprising SEQ ID NO: 1027 (Table 14) complexed with S. pyogenes Cas9 (SEQ ID NO:1033)) or ssODN OLI16431 (SEQ ID NO:1040, Table 11) was tested. Briefly, a dosing matrix with RNP33 (no 5′ or 3′ gRNA modification, Table 21) complexes at varying concentrations (6 μM, 8 μM, 8 μM, and 12 μM) were co-delivered with Sp182 RNP (8 μM, 8 μM, 6 μM, and 4 μM) or ssODN OLI16431 (8 μM, 8 μM, 6 μM, and 4 μM) to 5.25×10⁶ mPB CD34+ cells via MaxCyte electroporation, following 48 hours pre-stimulation in X-Vivo 10 media supplemented with SCF, TPO and FLT3. Following electroporation, cells were placed back to culture for a further 48 hours. Then, a fraction of the CD34 cells were split for gDNA extraction and indel quantification in the bulk cell population. In addition, to investigate the editing in phenotypic progenitors and phenotypic hematopoietic stem cells (HSCs), HSPC subpopulations were characterized (amongst the remainder CD34 cells) by immune-phenotyping (Notta 2011) and separated by fluorescence Activated Cell Sorting (FACS). Immune phenotyping at 48 hours post electroporation was performed by staining cells with antibodies against hCD34, hCD38, hCD45RA, hCD90, and hCD123. Phenotypic HSCs were defined as hCD34bright hCD38 hCD90+hCD45RA-, and progenitors were defined as hCD34bright CD38+. These two populations were sorted by FACS and DNA was extracted to determine the editing levels in these sub-populations. The level of insertions/deletions at the target site was analyzed by Illumina sequencing (NGS) of the PCR amplified target. Results demonstrate that RNP33 co-delivered with the “booster elements” Sp182 RNP or ssODN OLI16431 support on-target editing (FIGS. 38A-B) at levels higher than those observed when delivering RNP33 alone (FIG. 37).

[0417] Next, the effect of co-delivery of RNP33 (no 5′ or 3′ gRNA modification, Table 21), RNP43 (+25 DNA 5′ gRNA modification, Table 21) or RNP34 (1×PS2-OMe+1×OMe 3′ gRNA modifications, Table 21) with Sp182 dgRNA (Table 15) or ssODN OLI16431 (Table 11) was tested. Briefly, RNP33, RNP34, or RNP43 complexes (8 μM) were co-delivered with Sp182 RNP (8 μM) or ssODN OLI16431 (8 μM) to 5.25×10⁶ mPB CD34+ cells via MaxCyte electroporation, following 48 hours pre-stimulation in X-Vivo 10 media supplemented with SCF, TPO and FLT3. Following electroporation, cells were placed back to culture for a further 48 hours prior to sorting into phenotypic progenitor and phenotypic HSC fractions for indel quantification. The level of insertions/deletions at the target site was analyzed by Illumina sequencing (NGS) of the PCR amplified target site at 48 hours after electroporation. Results demonstrate that RNPs containing gRNAs with 5′ modification or 3′ modifications co-delivered with the “booster elements” Sp182 RNP or ssODN OLI16431 support on-target editing (FIG. 39). Both booster elements tested provided comparable editing levels to RNP34 and RNP33. When compared to editing levels obtained without the booster element, while RNP33 editing was enhanced by both booster elements, RNP43 editing was however only increased with the addition of Sp182 RNP (FIGS. 37, 39).

[0418] Next the effect of different Cpf1 proteins on RNP editing was tested. A stoichiometric comparison (gRNA: Cpf1) with RNPs comprising various Cpf1 proteins was performed. Briefly, RNPs (RNP64, RNP63, RNP45, Table 21) were delivered at a stoichiometry (gRNA: Cpf1 complexation ratio) of either 2 or 4, where the gRNA is in a molar excess. All RNPs were delivered via MaxCyte electroporation at 8 μM to 1×10⁶CD34+ cells following 48 hours pre-stimulation in X-Vivo 10 media supplemented with SCF, TPO and FLT3. Following electroporation, cells were placed back to culture for a further 72 hours prior to indel quantification. Results demonstrated that there was no difference in editing rates with altered stoichiometry at the concentration tested (FIG. 40). RNP45 (comprising Cpf1 protein SEQ ID NO:1094) outperforms RNP63 (comprising Cpf1 protein SEQ ID NO:1095) and RNP64 (comprising Cpf1 SEQ ID NO:1109).

[0419] Next, the effect of Sp182 RNP or ssODN OLI16431 co-delivery with various RNPs containing different Cpf1 proteins was tested. Briefly, RNPs (RNP33, RNP64, RNP63, RNP45, Table 21) were delivered alone or in combination with Sp182 RNP or ssODN OLI16431. All reagents were delivered via MaxCyte electroporation at 8 μM to 1×10⁶ CD34+ cells following 48 hours pre-stimulation in X-Vivo 10 media supplemented with SCF, TPO and FLT3. Following electroporation, cells were placed back to culture for a further 72 hours prior to indel quantification. Results indicate the “booster elements” Sp182 RNP or ssODN OLI16431 enhanced editing for all RNPs tested (FIG. 41).

[0420] The effect of editing using RNPs containing gRNAs with various 5′ DNA extensions, or RNP without a 5′ DNA extension (RNP45) co-delivered with or without ssODN OLI16431 was tested. Briefly, following 48 hours pre-stimulation in X-Vivo 10 media supplemented with SCF, TPO and FLT3, RNPs (RNP45 (no 5′ modification), RNP46, RNP47, RNP48, RNP49, RNP50, RNP51, RNP52, RNP53, RNP54, RNP55, RNP56, and RNP57, Table 21) at a concentration of 8 μM were delivered alone or co-delivered with 8 μM ssODN OLI16431 via MaxCyte electroporation to 1×10⁶ CD34+ cells. Following electroporation, cells were placed back to culture prior to indel quantification. Results demonstrate that all RNPs support on-target editing (FIG. 42).

[0421] The effect of editing using RNPs including gRNAs having the same 5′ DNA extension but different 3′ gRNA modifications was tested to assess the impact of 3′ gRNA modifications. Briefly, RNPs comprising gRNAs with matched 5′ ends, but different 3′ gRNA modifications (RNP49 vs. RNP58 and RNP59 v. RNP60) were delivered at a concentration of 8 μM via MaxCyte electroporation to 1×10⁶ CD34+ cells following 48 hours pre-stimulation in X-Vivo 10 media supplemented with SCF, TPO and FLT3. Following electroporation, cells were placed back to culture prior to indel quantification. In both comparisons, RNPs containing gRNA with 3′ PS—OMe outperformed the unmodified 3′ version at 24h post electroporation (FIG. 43).

[0422] Next, different concentrations of Cpf1 and gRNA for RNP58 were tested. Briefly, RNP58 (+25 DNA 5′ gRNA modification and 1×PS-OMe 3′ gRNA modification, Table 21) was delivered via MaxCyte electroporation to 1×10⁶ CD34+ cells following 48 hours pre-stimulation at a stoichiometry (gRNA: Cpf1 complexation ratio) of either 2:1, 1:1 or 0.5:1 molar ratios. Following electroporation, cells were placed back to culture prior to indel quantification. At all doses tested, editing was best when RNP was complexed at a 2:1 ratio (FIGS. 44A-B).

[0423] The effect of editing using RNPs including gRNAs having the same 5′ DNA extension but different 3′ gRNA modifications was further tested to assess the impact of 3′ gRNA modifications. Briefly, RNPs comprising gRNAs with matched 5′ ends, but different 3′ gRNA modifications (RNP58, RNP2, RNP3, RNP4, RNP5, RNP6, RNP7, RNP8, RNP9, RNP10) were delivered at varying concentrations (1 μM, 2 μM, 4 μM) via MaxCyte electroporation to 1×10⁶ CD34+ cells following 48 hours pre-stimulation. Following electroporation, cells were placed back to culture prior to indel quantification. Results indicate that all RNPs support on-target editing (FIGS. 45A-B).

[0424] Next, editing by RNPs that include gRNAs with 3′ gRNA modifications or 5′ and 3′ modifications that target various regions of the HBG promoter were tested. Those include guide RNAs SEQ ID NOs: 1085-1096, comprising targeting domains SEQ ID NOs: 1260 (AsCpf1 HBG1 Promoter-1 (21mer)), 1262 (AsCpf1 HBG1 Promoter-2 (21mer)), 1264 (AsCpf1 HBG1 Promoter-6 (21mer)) (Table 22, Table 23). Instead of the distal CCAAT box target region, those gRNAs are configured to provide an editing event within regions selected from Table 17. Briefly, RNPs including gRNAs containing an unmodified 5′ gRNA and a 1×PS-OMe 3′ gRNA modification (RNP11, RNP16, RNP19, and RNP22, Table 21), RNPs including gRNAs containing a +20 DNA+2×PS 5′ gRNA modification and a 1×PS-OMe 3′ gRNA modification (RNP12, RNP21, and RNP24, Table 21), RNPs including gRNAs containing a +25 DNA 5′ gRNA modification and a 1×PS-OMe 3′ gRNA modification (RNP58 and RNP20, Table 21) were delivered at a concentration of 8 μM via MaxCyte electroporation to 1×10⁶ CD34+ cells following 48 hours pre-stimulation in X-Vivo 10 media supplemented with SCF, TPO and FLT3. Following the editing of mPB CD34+ cells, ex vivo differentiation into the erythroid lineage was performed for 18 days (Giarratana 2011), with gDNA being isolated on day 14 of culture for indel analysis. Briefly, RNP was delivered to CD34+ cells, as described above. Following 48 hours recovery in X-Vivo 10 media supplemented with SCF, TPO and FLT3, the treated cells were counted and transferred to erythroid differentiation media, with cell counts and feeds occurring on days 4, 7, 10 and 14, with erythroid collection at day 18. These CD34+derived erythroid cells were then counted and lysed in HPLC grade water, before filtering to removed cell debris. Then, relative expression levels of gamma-globin chains (over total beta-like globin chains) was measured for each sample by UPLC, with protein separation being achieved by gradually increasing the ratio of acetonitrile with 0.1% trifluoroacetic acid, to water with 0.1% trifluoroacetic acid (FIGS. 46A-C). FIGS. 46A-C showed all RNP supported on-target editing. However only editing at certain target sites give rise to increased HBF expression. The same experiment was performed with varying concentrations (0, 1 μM, 2 μM, 4 μM) of RNP58 (FIG. 47).

[0425] Next the effect of different Cpf1 proteins on RNP editing was tested. Briefly, RNP58, RNP26, RNP27, and RNP28 (Table 21) including gRNAs comprising SEQ ID NO: 1051 (+25 DNA 5′ gRNA modification and a 1×PS-OMe 3′ gRNA modification, Table 19) complexed with varying Cpf1 proteins were delivered via MaxCyte electroporation at 8 μM to 1×10⁶ CD34+ cells following 48 hours pre-stimulation in X-Vivo 10 media supplemented with SCF, TPO and FLT3. Results demonstrated that all RNPs support on-target editing (FIG. 48).

[0426] Next the effect of different RNPs containing gRNAs with various 5′ gRNA modifications and the same 3′ modification was tested. Briefly, RNPs (RNP58 (+25 DNA 5′ gRNA modification and a 1×PS-OMe 3′ gRNA modification), RNP29 (+25 DNA+2×PS 5′ gRNA modification and a 1×PS-OMe 3′ gRNA modification), RNP30 (PolyA RNA+2×PS 5′ gRNA modification and a 1×PS-OMe 3′ gRNA modification), and RNP31 (PolyU RNA+2×PS 5′ gRNA modification and a 1×PS-OMe 3′ gRNA modification) (Table 21)) were delivered via MaxCyte electroporation at 1 μM, 2 μM, or 4 μM to 1×10⁶ CD34+ cells following 48 hours pre-stimulation in X-Vivo 10 media supplemented with SCF, TPO and FLT3 (RNP30 was not tested at 1 μM due to availability of cells). Results demonstrated that all RNPs support on-target editing (FIG. 49).

[0427] Next the effect of different Cpf1 proteins on RNP editing was tested. Briefly, RNP58, RNP27, and RNP26 (Table 21) including gRNAs comprising SEQ ID NO: 1051 (+25 DNA 5′ gRNA modification and a 1×PS-OMe 3′ gRNA modification, Table 19) complexed with varying Cpf1 proteins were delivered via MaxCyte electroporation at 2 μM or 4 μM to 1×10⁶ CD34+ cells following 48 hours pre-stimulation in X-Vivo 10 media supplemented with SCF, TPO and FLT3. To investigate the editing in bulk CD34, phenotypic progenitors, and phenotypic hematopoietic stem cells (HSCs), HSPC subpopulations were characterized. Thus, following electroporation, cells were placed back to culture for a further 48 hours prior to sorting into progenitor and HSC fractions for indel quantification. The level of insertions/deletions at the target site was analyzed by Illumina sequencing (NGS) of the PCR amplified target site at 48 hours after electroporation. Results demonstrated that all RNPs support on-target editing in bulk CD34, phenotypic progenitors, and phenotypic hematopoietic stem cells (FIG. 50).

[0428] Next, the effect of co-delivery of RNP with Sp182 RNP (dead gRNA comprising SEQ ID NO: 1027 (Table 14) complexed with S. pyogenes Cas9 (SEQ ID NO: 1033)) or ssODN OLI16431 (SEQ ID NO: 1040, Table 11) on RNP containing different Cpf1 proteins was tested. Briefly, RNP61, RNP62, RNP34 (Table 21) were co-delivered at 8 μM with Sp182 RNP (8 μM) or ssODN OLI16431 (8 μM) to 25×10⁶ mPB CD34+ cells via MaxCyte electroporation, following 48 hours pre-stimulation in X-Vivo 10 media supplemented with SCF, TPO and FLT3. To investigate the editing in bulk CD34, phenotypic progenitors, and phenotypic hematopoietic stem cells (HSCs), HSPC subpopulations were characterized. Thus, following electroporation, cells were placed back to culture for a further 48 hours prior to sorting into progenitor and HSC fractions for indel quantification. The level of insertions/deletions at the target site was analyzed by Illumina sequencing (NGS) of the PCR amplified target site at 48 hours after electroporation. Results demonstrate that RNP co-delivered with the “booster elements” Sp182 RNP or ssODN OLI16431 support on-target editing (FIG. 51). A fraction of these cells were also cryopreserved 24 hours post electroporation to be further characterized in an in vivo engraftment model (see Example 23).

[0429] Next, the effect of RNP58 and RNP32 editing was tested. Briefly, RNP58 and RNP32 (Table 21) were delivered at 2 μM to 6×10⁶ mPB CD34+ cells via MaxCyte electroporation, following 48 hours pre-stimulation in X-Vivo 10 media supplemented with SCF, TPO and FLT3. To investigate the editing in bulk CD34, phenotypic progenitors, and phenotypic HSCs, HSPC subpopulations were characterized. Thus, following electroporation, cells were placed back to culture for a further 48 hours prior to sorting into progenitor and HSC fractions for indel quantification. The level of insertions/deletions at the target site was analyzed by Illumina sequencing (NGS) of the PCR amplified target site at 48 hours after electroporation. Results demonstrate that RNP58 and RNP32 support on-target editing (FIG. 52).

[0430] RNP58 and RNP1 (Table 21) were delivered at concentrations of 2 μM to 8 μM to 25×10⁶ mPB CD34+ cells via MaxCyte electroporation, following 48 hours pre-stimulation in X-Vivo 10 media supplemented with SCF, TPO and FLT3. To investigate the editing in bulk CD34, phenotypic progenitors, and phenotypic hematopoietic stem cells (HSCs), HSPC subpopulations were characterized. Thus, following electroporation, cells were placed back to culture for a further 48 hours prior to sorting into progenitor and HSC fractions for indel quantification. The level of insertions/deletions at the target site was analyzed by Illumina sequencing (NGS) of the PCR amplified target site at 48 hours after electroporation. Results demonstrate that the RNP tested support on-target editing (FIG. 53). A fraction of these cells were also cryopreserved 24 hours post electroporation for further characterized in an in vivo engraftment model (see Example 23).

### Example 23: Infusion of Edited mPB CD34+ Cells into NOD,B6.SCID II2rγ−/− Kit (W41/W41) Mice Results in Long Term Engraftment and HbF Induction

[0431] To determine whether delivery of RNP34 and RNP33 (Table 21) co-delivered with ssODN OLI16431 (SEQ ID NO:1040, Table 11) achieves edits in long term repopulating hematopoietic stem cells, human adult CD34+ cells from mobilized peripheral blood (mPB) were infused into nonirradiated NOD,B6.SCID I12rγ−/− Kit (W41/W41) (Jackson lab stock name: NOD.Cg-Kit<W-41J>Tyr<+>Prkdc<scid>II2rg<tm1Wjl>/ThomJ) (“NBSGW”) mice. Briefly, mPB CD34+ cells at 62.5×10⁶/mL were electroporated via MaxCyte electroporation with RNP at a dose of 8 μM and 6 μM ssODN OLI16431 following 48 hours pre-stimulation in X-Vivo 10 media supplemented with SCF, TPO and FLT3. After 24 hours, mCD34+ cells were cryopreserved. Five days later, mPB CD34+ cells were thawed and infused into NBSGW mice at 1 million cells per mouse via intravenous tail vein injection. Eight weeks later, mice were euthanized and bone marrow (BM) was collected from femurs, tibias, and pelvic bones. Bone marrow sub-populations of cells respectively identified as CD15+, CD19+, glycophorin A (GlyA, CD235a+), and lineage-negative CD34+were isolated by FACS, and DNA was extracted to determine the editing levels in each of these fractions. FIG. 54 depicts the frequency of indels, as determined by next generation sequencing, of unfractionated BM, or flow-sorted individual BM sub-populations.

[0432] Next, to determine whether delivery of RNP34 or RNP33 (Table 21) co-delivered with Sp182 RNP (dead gRNA comprising SEQ ID NO:1027 (Table 14) complexed with S. pyogenes Cas9 (SEQ ID NO: 1033)) achieves edits in long term repopulating hematopoietic stem cells, human adult CD34+ cells from mobilized peripheral blood (mPB) were infused into nonirradiated NBSGW mice. Briefly, mPB CD34+ cells at 62.5×10⁶/mL were electroporated via MaxCyte electroporation with RNP at varying doses and varying doses of Sp182 RNP following 48 hours pre-stimulation in X-Vivo 10 media supplemented with SCF, TPO and FLT3. After 24 hours, mCD34+ cells were cryopreserved. Five days later, mPB CD34+ cells were thawed and infused into NBSGW mice at 1 million cells per mouse via intravenous tail vein injection. Eight weeks later, mice were euthanized and bone marrow (BM) was collected from femurs, tibias, and pelvic bones. Bone marrow sub-populations of cells respectively identified as CD15+, CD19+, glycophorin A (GlyA, CD235a+), and lineage-negative CD34+were isolated by FACS, and DNA was extracted to determine the editing levels in each of these fractions. FIG. 55A depicts the frequency of indels, as determined by next generation sequencing, of unfractionated BM, or flow-sorted individual BM sub-populations.

[0433] Lastly, long term HbF induction by BM-derived CD34+ cells was analyzed. An aliquot of BM cells were cultured under erythroid differentiation conditions for 18 days (Giarratana 2011), and evaluated for HbF expression by UPLC. Briefly, unfractionated BM cells extracted from mice 8 weeks after infusion were placed in erythroid culture conditions for 18 days. Cell counts and feeds occurred on days 7, 10 and 14, with erythroid collection at day 18. These bone marrow derived erythroid cells were then counted and lysed in HPLC grade water before filtering to removed cell debris. Then, relative expression levels of gamma-globin chains (over total beta-like globin chains) was measured for each sample by UPLC, with protein separation being achieved by gradually increasing the ratio of acetonitrile with 0.1% trifluoroacetic acid, to water with 0.1% trifluoroacetic acid (FIG. 54B). These data demonstrate that robust long-term HbF induction is achieved by RNP34 and RNP33 co-delivered with Sp182 RNP editing of human CD34+ cells.

[0434] Next, to determine whether delivery of RNP61 or RNP62 (Table 21) co-delivered with ssODN OLI16431 (SEQ ID NO:1040, Table 11) achieves edits in long term repopulating hematopoietic stem cells, human adult CD34+ cells from mPB were infused into nonirradiated NBSGW mice. Briefly, mPB CD34+ cells at 62.5×10⁶/mL were electroporated via MaxCyte electroporation with 8 μM RNP and 8 μM ssODN OLI16431 following 48 hours pre-stimulation in X-Vivo 10 media supplemented with SCF, TPO and FLT3. After 24 hours, mCD34+ cells were cryopreserved. Four days later, mPB CD34+ cells were thawed and infused into NBSGW mice at 1 million cells per mouse via intravenous tail vein injection. Eight weeks later, mice were euthanized and bone marrow (BM) was collected from femurs, tibias, and pelvic bones. Bone marrow sub-populations of cells respectively identified as CD15+, CD19+, glycophorin A (GlyA, CD235a+), and lineage-negative CD34+were isolated by FACS, and DNA was extracted to determine the editing levels in each of these fractions. FIG. 56A depicts the frequency of indels, as determined by next generation sequencing, of unfractionated BM, or flow-sorted individual BM sub-populations.

[0435] Lastly, long term HbF induction by BM-derived CD235a+ (GlyA+) erythroid cells was analyzed. An aliquot of BM cells were cultured under erythroid differentiation conditions for 18 days and evaluated for HbF expression by UPLC. Briefly, unfractionated BM cells extracted from mice 8 weeks after infusion were placed in erythroid culture conditions for 18 days. FIG. 56B depicts the HbF expression, calculated as gamma/beta-like chains (%) by erythroid cells. These data demonstrate that robust long-term HbF induction is achieved by RNP61 and RNP62 co-delivered with ssODN OLI16431 editing of human CD34+ cells.

[0436] Next, to determine whether delivery of RNP1 or RNP58 (Table 21) achieves edits in long term repopulating hematopoietic stem cells, human adult CD34+ cells from mPB were infused into nonirradiated NBSGW mice. Briefly, mPB CD34+ cells at 62.5×10⁶/mL were electroporated via MaxCyte electroporation with 4 μM or 8 μM RNP1 or 2 μM, 4 μM, or 8 μM RNP58 following 48 hours pre-stimulation in X-Vivo 10 media supplemented with SCF, TPO and FLT3. After 24 hours, mCD34+ cells were cryopreserved. Four days later, mPB CD34+ cells were thawed and infused into NBSGW mice at 1 million cells per mouse via intravenous tail vein injection. Eight weeks later, mice were euthanized and bone marrow (BM) was collected from femurs, tibias, and pelvic bones. Human chimerism and lineage reconstitution (CD45+, CD14+, CD19+, glycophorin A (GlyA, CD235a+), lineage, and CD34+, and mouse CD45+marker expression) in BM was determined by flow cytometry and analyzed (FIG. 57). The frequency of GlyA+ cells was calculated as GlyA+ cells/total cells in BM. Human chimerism was defined as human CD45/(human CD45+mCD45).

[0437] Similar chimerism and lineage distributions were achieved 8-weeks post-transplant by RNP-transfected mPB CD34+ cells compared to mock-transfected mPB CD34+ cells demonstrating that editing is comparable with retaining the engraftment potential of hematopoietic stem cells. FIG. 58 depicts the indels, as determined by next generation sequencing, of unfractionated BM, at 8 weeks post-infusion. FIG. 59 shows the frequency of indel rate in BM, CD15+, CD19+, glycophorin A (GlyA, CD235a+), and lin-CD34+ cells with 2 μM, 4 μM, or 8 UM of RNP58.

[0438] Long term HbF induction by CD235a+ (GlyA+) erythroid cells, derived from edited CD34+ cells was also analyzed. GlyA+ cells obtained from bone marrow, were isolated by fluorescence Activated Cell Sorting (FACS), collected and lysed in HPLC grade water. Lysates were then evaluated for HbF expression by UPLC. FIG. 60 depicts the HbF expression, calculated as gamma/beta-like chains (%) by GlyA+ cells. These data demonstrate that robust long-term HbF induction is achieved RNP58 editing of human CD34+ cells at various RNP58 concentrations.

[0439] Importantly, CD34⁺ cells that were electroporated with varying concentrations of RNP1 or RNP58 maintained their ex vivo hematopoietic activity (i.e., no difference in the quantity or diversity of erythroid and myeloid colonies compared to untreated donor matched CD34⁺ cell negative control), as determined in hematopoietic colony forming cell (CFC) assays (FIG. 61).

### Example 24: Treatment of β-Hemoglobinopathy Using Edited Hematopoietic Stem Cells

[0440] The methods and genome editing systems disclosed herein may be used for the treatment of a β-hemoglobinopathy, such as sickle cell disease or beta-thalassemia, in a patient in need thereof. For example, genome editing may be performed on cells derived from the patient in an autologous procedure. Correction of the patient's cells ex-vivo and reintroduction of the cells into the patient may result in increased HbF expression and treatment of the β-hemoglobinopathy.

[0441] For example, HSCs may be extracted from the bone marrow of a patient with a β-hemoglobinopathy using techniques that are well-known to skilled artisans. The HSCs may be modified using methods disclosed herein for genome editing. For example, RNPs comprised of guide RNAs (gRNA) that target one or more regions in the HBG gene complexed with an RNA-guided nuclease may be used to edit the HSCs. In certain embodiments, the RNA-guided nuclease may be a Cpf1 protein. In certain embodiments, the Cpf1 protein may be a modified Cpf1 protein. In certain embodiments, the modified Cpf1 protein may be encoded by a sequence set forth in SEQ ID NOs: 1000, 1001, 1008-1018, 1032, 1035-39, 1094-1097, 1107-09 (Cpf1 polypeptide sequences) or SEQ ID NOs: 1019-1021, 1110-17 (Cpf1 polynucleotide sequences). For example, the modified Cpf1 protein may be encoded by the sequence set forth in SEQ ID NO:1097. In certain embodiments, the gRNA may be a modified or unmodified gRNA. In certain embodiments, the gRNA may comprise a sequence set forth in Table 13, Table 18, or Table 19. For example, in certain embodiments, the gRNA may comprise the sequence set forth in SEQ ID NO:1051. In certain embodiments, the RNP complex may comprise an RNP complex set forth in Table 21. For example, the RNP complex may include a gRNA comprising the sequence set forth in SEQ ID NO:1051 and a modified Cpf1 protein encoded by the sequence set forth in SEQ ID NO: 1097 (RNP32, Table 21). In certain embodiments, modified HSCs have an increase in the frequency or level of an indel in the human HBG1 gene, HBG2 gene, or both, relative to unmodified HSCs. In certain embodiments, the modified HSCs can differentiate into erythroid cells that express an increased level of HbF. A population of the modified HSCs may be selected for reintroduction into the patient via transfusion or other methods known to skilled artisans. The population of modified HSCs for reintroduction may be selected based on, for example, increased HbF expression of the erythroid progeny of the modified HSCs or increased indel frequency of the modified HSCs. In some embodiments, any form of ablation prior to reintroduction of the cells may be used to enhance engraftment of the modified HSCs. In other embodiments, peripheral blood stem cells (PBSCs) can be extracted from a patient with a β-hemoglobinopathy using techniques that are well-known to skilled artisans (e.g., apheresis or leukapheresis) and stem cells can be removed from the PBSCs. The genome editing methods described above can be performed on the stem cells and the modified stem cells can be reintroduced into the patient as described above.

TABLE 20
Cpf1 Protein Variants

| | | Cpf1 Variant |
|---|---|---|
| Cpf1 | Cpf1 Variant Amino | Nucleotide |
| Variant ID | Acid SEQ ID NO | SEQ ID NO |
| His- | SEQ ID NO: 1032 | SEQ ID NO: 1110 |
| AsCpf1- | | |
| sNLS- | | |
| SNLS | | |
| H800A | | |
| Cpf1-1 | SEQ ID NO: 1094 | SEQ ID NO: 1111 |
| Cpf1-2 | SEQ ID NO: 1095 | SEQ ID NO: 1112 |
| Cpf1-3 | SEQ ID NO: 1096 | SEQ ID NO: 1113 |
| Cpf1-4 | SEQ ID NO: 1097 | SEQ ID NO: 1114 |
| Cpf1-5 | SEQ ID NO: 1107 | SEQ ID NO: 1115 |
| Cpf1-6 | SEQ ID NO: 1108 | SEQ ID NO: 1116 |
| Cpf1-7 | SEQ ID NO: 1109 | SEQ ID NO: 1117 |

TABLE 21
RNP complexes

| RNP | gRNA | Cpf1 Amino Acid |
|---|---|---|
| Name | SEQ ID NO* | SEQ ID NO** |
| RNP64 | SEQ ID NO: 1022 | SEQ ID NO: 1109 |
| RNP1 | SEQ ID NO: 1051 | SEQ ID NO: 1095 |
| RNP2 | SEQ ID NO: 1098 | SEQ ID NO: 1094 |
| RNP3 | SEQ ID NO: 1099 | SEQ ID NO: 1094 |
| RNP4 | SEQ ID NO: 1100 | SEQ ID NO: 1094 |
| RNP5 | SEQ ID NO: 1101 | SEQ ID NO: 1094 |
| RNP6 | SEQ ID NO: 1068 | SEQ ID NO: 1094 |
| RNP7 | SEQ ID NO: 1102 | SEQ ID NO: 1094 |
| RNP8 | SEQ ID NO: 1081 | SEQ ID NO: 1094 |
| RNP9 | SEQ ID NO: 1082 | SEQ ID NO: 1094 |
| RNP10 | SEQ ID NO: 1083 | SEQ ID NO: 1094 |
| RNP11 | SEQ ID NO: 1069 | SEQ ID NO: 1094 |
| RNP12 | SEQ ID NO: 1084 | SEQ ID NO: 1094 |
| RNP16 | SEQ ID NO: 1085 | SEQ ID NO: 1094 |
| RNP19 | SEQ ID NO: 1088 | SEQ ID NO: 1094 |
| RNP20 | SEQ ID NO: 1089 | SEQ ID NO: 1094 |
| RNP21 | SEQ ID NO: 1090 | SEQ ID NO: 1094 |
| RNP22 | SEQ ID NO: 1091 | SEQ ID NO: 1094 |
| RNP23 | SEQ ID NO: 1048 | SEQ ID NO: 1097 |
| RNP24 | SEQ ID NO: 1093 | SEQ ID NO: 1094 |
| RNP26 | SEQ ID NO: 1051 | SEQ ID NO: 1096 |
| RNP27 | SEQ ID NO: 1051 | SEQ ID NO: 1107 |
| RNP28 | SEQ ID NO: 1051 | SEQ ID NO: 1108 |
| RNP29 | SEQ ID NO: 1103 | SEQ ID NO: 1094 |
| RNP30 | SEQ ID NO: 1104 | SEQ ID NO: 1094 |
| RNP31 | SEQ ID NO: 1105 | SEQ ID NO: 1094 |
| RNP32 | SEQ ID NO: 1051 | SEQ ID NO: 1097 |
| RNP33 | SEQ ID NO: 1022 | SEQ ID NO: 1032 |
| RNP34 | SEQ ID NO: 1041 | SEQ ID NO: 1032 |
| RNP37 | SEQ ID NO: 1042 | SEQ ID NO: 1032 |
| RNP38 | SEQ ID NO: 1043 | SEQ ID NO: 1032 |
| RNP39 | SEQ ID NO: 1044 | SEQ ID NO: 1032 |
| RNP40 | SEQ ID NO: 1045 | SEQ ID NO: 1032 |
| RNP41 | SEQ ID NO: 1046 | SEQ ID NO: 1032 |
| RNP42 | SEQ ID NO: 1047 | SEQ ID NO: 1032 |
| RNP43 | SEQ ID NO: 1048 | SEQ ID NO: 1032 |
| RNP44 | SEQ ID NO: 1049 | SEQ ID NO: 1032 |
| RNP45 | SEQ ID NO: 1022 | SEQ ID NO: 1094 |
| RNP46 | SEQ ID NO: 1046 | SEQ ID NO: 1094 |
| RNP47 | SEQ ID NO: 1047 | SEQ ID NO: 1094 |
| RNP48 | SEQ ID NO: 1052 | SEQ ID NO: 1094 |
| RNP49 | SEQ ID NO: 1048 | SEQ ID NO: 1094 |
| RNP50 | SEQ ID NO: 1053 | SEQ ID NO: 1094 |
| RNP51 | SEQ ID NO: 1054 | SEQ ID NO: 1094 |
| RNP52 | SEQ ID NO: 1055 | SEQ ID NO: 1094 |
| RNP53 | SEQ ID NO: 1056 | SEQ ID NO: 1094 |
| RNP54 | SEQ ID NO: 1057 | SEQ ID NO: 1094 |
| RNP55 | SEQ ID NO: 1058 | SEQ ID NO: 1094 |
| RNP56 | SEQ ID NO: 1059 | SEQ ID NO: 1094 |
| RNP57 | SEQ ID NO: 1060 | SEQ ID NO: 1094 |
| RNP58 | SEQ ID NO: 1051 | SEQ ID NO: 1094 |
| RNP59 | SEQ ID NO: 1067 | SEQ ID NO: 1094 |
| RNP60 | SEQ ID NO: 1068 | SEQ ID NO: 1094 |
| RNP61 | SEQ ID NO: 1041 | SEQ ID NO: 1095 |
| RNP62 | SEQ ID NO: 1041 | SEQ ID NO: 1094 |
| RNP63 | SEQ ID NO: 1022 | SEQ ID NO: 1095 |

*See Table 19
**See Table 20

TABLE 22
Cpf1 HBG1 targeting domains and expected cleavage sites

| | gRNA | gRNA | Targeting | Expected | | |
|---|---|---|---|---|---|---|
| | Targeting | Targeting | Domain | cleavage site | | Targeting |
| gRNA | Domain | Domain | coordinates at | coordinates at | | Domain |
| ID | (RNA) | (DNA) | HBG1 * | HBG1^{#} | Strand | Length |
| HBG1-1 | CCUUGUCAA | CCTTGTCA | Chr11:5249954- | Chr11:5249973, | + | 20 |
| | GGCUAUUG | AGGCTATT | 5249974 | Chr11:5249977 | | |
| | GUC (SEQ ID | GGTC (SEQ | | | | |
| | NO: 1002) | ID NO: 1003) | | | | |
| HBG1-1 | CCUUGUCAA | CCTTGTCA | Chr11:5249954- | Chr11:5249973, | + | 21 |
| (21mer) | GGCUAUUG | AGGCTATT | Chr11:5249975 | Chr11:5249977 | | |
| | GUCA (SEQ | GGTCA (SEQ | | | | |
| | ID NO: 1254) | ID NO: 1255) | | | | |
| HBG1-1 | CCUUGUCAA | CCTTGTCA | Chr11:5249954- | Chr11:5249973, | + | 22 |
| (22mer) | GGCUAUUG | AGGCTATT | Chr11:5249976 | Chr11:5249977 | | |
| | GUCAA (SEQ | GGTCAA | | | | |
| | ID NO: 1256) | (SEQ ID | | | | |
| | | NO: 1257) | | | | |
| HBG1-1 | CCUUGUCAA | CCTTGTCA | Chr11:5249954- | Chr11:5249973, | + | 23 |
| (23mer) | GGCUAUUG | AGGCTATT | Chr11:5249976 | Chr11:5249977 | | |
| | GUCAAG | GGTCAAG | | | | |
| | (SEQ ID | (SEQ ID | | | | |
| | NO: 1258) | NO: 1259) | | | | |
| AsCpf1 | AGACAGAU | AGACAGAT | Chr11:5250023- | Chr11:5250042, | + | 20 |
| HBG1 | AUUUGCAU | ATTTGCATT | Chr11:5250043 | Chr11:5250046 | | |
| Promoter- | UGAG (SEQ | GAG (SEQ ID | | | | |
| 1 | ID NO: 1139) | NO: 1140) | | | | |
| AsCpf1 | AGACAGAU | AGACAGAT | Chr11:5250023- | Chr11:5250042, | + | 21 |
| HBG1 | AUUUGCAU | ATTTGCATT | Chr11:5250044 | Chr11:5250046 | | |
| Promoter- | UGAGA (SEQ | GAGA (SEQ | | | | |
| 1 | ID NO: 1260) | ID NO: 1261) | | | | |
| (21mer) | | | | | | |
| AsCpf1 | CAUUGAGA | CATTGAGA | Chr11:5250036- | Chr11:5250055, | + | 20 |
| HBG1 | UAGUGUGG | TAGTGTGG | Chr11:5250056 | Chr11:5250059 | | |
| Promoter- | GGAA (SEQ | GGAA (SEQ | | | | |
| 2 | ID NO: 1141) | ID NO: 1142) | | | | |
| AsCpf1 | CAUUGAGA | CATTGAGA | Chr11:5250036- | Chr11:5250055, | + | 21 |
| HBG1 | UAGUGUGG | TAGTGTGG | Chr11:5250057 | Chr11:5250059 | | |
| Promoter- | GGAAG (SEQ | GGAAG | | | | |
| 2 | ID NO: 1262) | (SEQ ID | | | | |
| (21mer) | | NO: 1263) | | | | |
| AsCpf1 | CUUCUCCCA | CTTCTCCCA | Chr11:5250160- | Chr11:5250179, | + | 20 |
| HBG1 | UCAUAGAG | TCATAGAG | Chr11:5250180 | Chr11:5250183 | | |
| Promoter- | GAU (SEQ ID | GAT (SEQ ID | | | | |
| 6 | NO: 1149) | NO: 1150) | | | | |
| AsCpf1 | CUUCUCCCA | CTTCTCCCA | Chr11:5250160- | Chr11:5250179, | + | 21 |
| HBG1 | UCAUAGAG | TCATAGAG | Chr11:5250181 | Chr11:5250183 | | |
| Promoter- | GAUA (SEQ | GATA (SEQ | | | | |
| 6 | ID NO: 1264) | ID NO: 1265) | | | | |
| (21 mer) | | | | | | |

* NCBI Reference Sequence NC_000011, the coordinates are reported using the One-based coordinate system, ″Homo sapiens chromosome 11, GRCh38.p12 Primary Assembly,” (Version NC_000011.10).
^{#}Expected cleavage sites based on Zetsche et al, 2015, coordinates are reported using zero-based coordinates.

TABLE 23
Cpf1 HBG2 targeting domains and expected cleavage sites

| | gRNA | gRNA | Targeting | Expected | | |
|---|---|---|---|---|---|---|
| | Targeting | Targeting | Domain | cleavage site | | Targeting |
| gRNA | Domain | Domain | coordinates at | coordinates at | | Domain |
| ID | (RNA) | (DNA) | HBG2 * | HBG2^{#} | Strand | Length |
| HBG1-1 | CCUUGUCAA | CCTTGTCAAG | Chr11:5254878 | Chr11:5254897, | + | 20 |
| | GGCUAUUG | GCTATTGGTC | Chr11:5254898 | Chr11:5254901 | | |
| | GUC (SEQ ID | (SEQ ID | | | | |
| | NO: 1002) | NO: 1003) | | | | |
| HBG1-1 | CCUUGUCAA | CCTTGTCAAG | Chr11:5254878 | Chr11:5254897, | + | 21 |
| 21mer | GGCUAUUG | GCTATTGGTC | Chr11:5254899 | Chr11:5254901 | | |
| | GUCA (SEQ | A (SEQ ID | | | | |
| | ID NO: 1254) | NO: 1255) | | | | |
| HBG1-1 | CCUUGUCAA | CCTTGTCAAG | Chr11:5254878 | Chr11:5254897, | + | 22 |
| 22mer | GGCUAUUG | GCTATTGGTC | Chr11:5254900 | Chr11:5254901 | | |
| | GUCAA (SEQ | AA (SEQ ID | | | | |
| | ID NO: 1256) | NO: 1257) | | | | |
| HBG1-1 | CCUUGUCAA | CCTTGTCAAG | Chr11:5254878 | Chr11:5254897, | + | 23 |
| 23mer | GGCUAUUG | GCTATTGGTC | Chr11:5254901 | Chr11:5254901 | | |
| | GUCAAG | AAG (SEQ ID | | | | |
| | (SEQ ID | NO: 1259) | | | | |
| | NO: 1258) | | | | | |
| AsCpf1 | AGACAGAU | AGACAGATA | Chr11:5254947 | Chr11:5254966 | + | 20 |
| HBG1 | AUUUGCAU | TTTGCATTGA | Chr11:5254967 | Chr11:5254970 | | |
| Promoter- | UGAG (SEQ | G (SEQ ID | | | | |
| 1 | ID NO: 1139) | NO: 1140) | | | | |
| AsCpf1 | AGACAGAU | AGACAGATA | Chr11:5254947 | Chr11:5254966 | + | 21 |
| HBG1 | AUUUGCAU | TTTGCATTGA | Chr11:5254968 | Chr11:5254970 | | |
| Promoter- | UGAGA (SEQ | GA (SEQ ID | | | | |
| 1 | ID NO: 1260) | NO: 1261) | | | | |
| (21mer) | | | | | | |
| AsCpf1 | CAUUGAGA | CATTGAGAT | Chr11:5254960 | Chr11:5254979 | + | 20 |
| HBG1 | UAGUGUGG | AGTGTGGGG | Chr11:5254980 | Chr11:5254983 | | |
| Promoter- | GGAA (SEQ | AA | | | | |
| 2 | ID NO: 1141) | (SEQ ID | | | | |
| | | NO: 1142) | | | | |
| AsCpf1 | CAUUGAGA | CATTGAGAT | Chr11:5254960 | Chr11:5254979 | + | 21 |
| HBG1 | UAGUGUGG | AGTGTGGGG | Chr11:5254981 | Chr11:5254983 | | |
| Promoter- | GGAAG (SEQ | AAG (SEQ ID | | | | |
| 2 | ID NO: 1262) | NO: 1263) | | | | |
| (21mer) | | | | | | |

* NCBI Reference Sequence NC_000011, the coordinates are reported using the One-based coordinate system, “Homo sapiens chromosome 11, GRCh38.p12 Primary Assembly,” (Version NC_000011.10).
^{#}Expected cleavage sites based on (Zetsche et al, 2015), coordinates are reported using zero-based coordinates.

TABLE 24
gRNA 5′ Extensions

| 5′ extension | | |
|---|---|---|
| Sequence ID | | |
| No: | 5′ extension sequence | 5′ modification |
| 1231 | rCrUrUrUrU | +5 RNA |
| 1232 | rArArGrArCrCrUrUrUrU | +10 RNA |
| 1233 | rArUrGrUrGrUrUrUrUrUrGrUrCrArArArArGrArCrCrUrUrUrU | +25 RNA |
| 1234 | rArGrGrCrCrArGrCrUrUrGrCrCrGrGrUrUrUrUrUrUrArGrUrCrG | +60 RNA |
| | rUrGrCrUrGrCrUrUrCrArUrGrUrGrUrUrUrUrUrGrUrCrArArAr | |
| | ArGrArCrCrUrUrUrU | |
| 1235 | CTTTT | +5 DNA |
| 1236 | AAGACCTTTT | +10 DNA |
| 1237 | ATGTGTTTTTGTCAAAAGACCTTTT | +25 DNA |
| 1238 | AGGCCAGCTTGCCGGTTTTTTAGTCGTGCTGCTTCATGTG | +60 DNA |
| | TTTTTGTCAAAAGACCTTTT | |
| 1239 | TTTTTGTCAAAAGACCTTTT | +20 DNA |
| 1240 | GCTTCATGTGTTTTTGTCAAAAGACCTTTT | +30 DNA |
| 1241 | GCCGGTTTTTTAGTCGTGCTGCTTCATGTGTTTTTGTCAAA | +50 DNA |
| | AGACCTTTT | |
| 1242 | TAGTCGTGCTGCTTCATGTGTTTTTGTCAAAAGACCTTIT | +40 DNA |
| 1243 | C*C*GAAGTTTTCTTCGGTTTT | +20 DNA + 2xPS |
| 1244 | T*T*TTTCCGAAGTTTTCTTCGGTTTT | +25 DNA + 2xPS |
| 1245 | A*A*CGCTTTTTCCGAAGTTTTCTTCGGTTTT | +30 DNA + 2xPS |
| 1246 | G*C*GTTGTTTTCAACGCTTTTTCCGAAGTTTTCTTCGGTT | +41 DNA + 2xPS |
| | TT | |
| 1247 | G*G*CTTCTTTTGAAGCCTTTTTGCGTTGTTTTCAACGCTT | +62 DNA + 2xPS |
| | TTTCCGAAGTTTTCTTCGGTTTT | |
| 1248 | A*T*GTGTTTTTGTCAAAAGACCTTTT | +25 DNA + 2xPS |
| 1249 | AAAAAAAAAAAAAAAAAAAAAAAAA | +25 A |
| 1250 | TTTTTTTTTTTTTTTTTTTTTTTTT | +25 T |
| 1251 | mA*mU*rGrUrGrUrUrUrUrUrGrUrCrArArArArGrArCrCrUrUrU | +25 RNA + 2xPS |
| | rU | |
| 1252 | mA*mA*rArArArArArArArArArArArArArArArArArArArArAr | PolyA RNA + |
| | ArA | 2xPS |
| 1253 | mU*mU*rUrUrUrUrUrUrUrUrUrUrUrUrUrUrUrUrUrUrUrUrUr | PolyU RNA + |
| | UrU | 2xPS |

All bases are in upper case
Lowercase “r” represents RNA, 2′-hydroxy; bases not modified by an “r” are DNA
All bases are linked via standard phosphodiester bonds except as noted:
“*” represents phosphorothioate modification
“PS” represents phosphorothioate modification

TABLE 19
Cpf1 guide RNAs

| | | | | Length of | | |
|---|---|---|---|---|---|---|
| gRNA | | | | crRNA + | Length of | gRNA |
| Sequence | | | | gRNA | gRNA | Targeting |
| SEQ ID | | | | targeting | targeting | Domain |
| NO. | gRNA Sequence | 5′ mod.** | 3′ mod. | domain | domain | (RNA) |
| 1022 | rUrArArUrUrUrCrUr | - | - | 40 | 20 | CCUUGUCAA |
| | ArCrUrCrUrUrGrUrA | | | | | GGCUAUUGG |
| | rGrArUrCrCrUrUrGr | | | | | UC (SEQ ID |
| | UrCrArArGrGrCrUrA | | | | | NO: 1002) |
| | rUrUrGrGrUrC | | | | | |
| 1023 | rUrArArUrUrUrCrUr | - | 1xPS2- | 41 | 21 | CCUUGUCAA |
| | ArCrUrCrUrUrGrUrA | | OMe + | | | GGCUAUUGG |
| | rGrArUrCrCrUrUrGr | | 1xOMe | | | UCA (SEQ ID |
| | UrCrArArGrGrCrUrA | | | | | NO: 1254) |
| | rUrUrGrGrUmC/PS2/ | | | | | |
| | mA | | | | | |
| 1041 | rUrArArUrUrUrCrUr | - | 1xPS2- | 40 | 20 | CCUUGUCAA |
| | ArCrUrCrUrUrGrUrA | | OMe + | | | GGCUAUUGG |
| | rGrArUrCrCrUrUrGr | | 1xOMe | | | UC (SEQ ID |
| | UrCrArArGrGrCrUrA | | | | | NO: 1002) |
| | rUrUrGrGmU/PS2/m | | | | | |
| | C | | | | | |
| 1042 | rCrUrUrUrUrUrArAr | +5 RNA | - | 45 | 20 | CCUUGUCAA |
| | UrUrUrCrUrArCrUrC | | | | | GGCUAUUGG |
| | rUrUrGrUrArGrArUr | | | | | UC (SEQ ID |
| | CrCrUrUrGrUrCrArA | | | | | NO: 1002) |
| | rGrGrCrUrArUrUrGr | | | | | |
| | GrUrC | | | | | |
| 1043 | rArArGrArCrCrUrUr | +10 RNA | - | 50 | 20 | CCUUGUCAA |
| | UrUrUrArArUrUrUrC | | | | | GGCUAUUGG |
| | rUrArCrUrCrUrUrGr | | | | | UC (SEQ ID |
| | UrArGrArUrCrCrUrU | | | | | NO: 1002) |
| | rGrUrCrArArGrGrCr | | | | | |
| | UrArUrUrGrGrUrC | | | | | |
| 1044 | rArUrGrUrGrUrUrUr | +25 RNA | - | 65 | 20 | CCUUGUCAA |
| | UrUrGrUrCrArArArA | | | | | GGCUAUUGG |
| | rGrArCrCrUrUrUrUr | | | | | UC (SEQ ID |
| | UrArArUrUrUrCrUrA | | | | | NO: 1002) |
| | rCrUrCrUrUrGrUrAr | | | | | |
| | GrArUrCrCrUrUrGrU | | | | | |
| | rCrArArGrGrCrUrAr | | | | | |
| | UrUrGrGrUrC | | | | | |
| 1045 | rArGrGrCrCrArGrCr | +60 RNA | - | 100 | 20 | CCUUGUCAA |
| | UrUrGrCrCrGrGrUrU | | | | | GGCUAUUGG |
| | rUrUrUrUrArGrUrCr | | | | | UC (SEQ ID |
| | GrUrGrCrUrGrCrUrU | | | | | NO: 1002) |
| | rCrArUrGrUrGrUrUr | | | | | |
| | UrUrUrGrUrCrArArA | | | | | |
| | rArGrArCrCrUrUrUr | | | | | |
| | UrUrArArUrUrUrCrU | | | | | |
| | rArCrUrCrUrUrGrUr | | | | | |
| | ArGrArUrCrCrUrUrG | | | | | |
| | rUrCrArArGrGrCrUr | | | | | |
| | ArUrUrGrGrUrC | | | | | |
| 1046 | CTTTTrUrArArUrUr | +5 DNA | - | 45 | 20 | CCUUGUCAA |
| | UrCrUrArCrUrCrUrU | | | | | GGCUAUUGG |
| | rGrUrArGrArUrCrCr | | | | | UC (SEQ ID |
| | UrUrGrUrCrArArGrG | | | | | NO: 1002) |
| | rCrUrArUrUrGrGrUr | | | | | |
| | C | | | | | |
| 1047 | AAGACCTTTTrUrAr | +10 DNA | - | 50 | 20 | CCUUGUCAA |
| | ArUrUrUrCrUrArCrU | | | | | GGCUAUUGG |
| | rCrUrUrGrUrArGrAr | | | | | UC (SEQ ID |
| | UrCrCrUrUrGrUrCrA | | | | | NO: 1002) |
| | rArGrGrCrUrArUrUr | | | | | |
| | GrGrUrC | | | | | |
| 1048 | ATGTGTTTTTGTCA | +25 DNA | - | 65 | 20 | CCUUGUCAA |
| | AAAGACCTTTTrUr | | | | | GGCUAUUGG |
| | ArArUrUrUrCrUrArC | | | | | UC (SEQ ID |
| | rUrCrUrUrGrUrArGr | | | | | NO: 1002) |
| | ArUrCrCrUrUrGrUrC | | | | | |
| | rArArGrGrCrUrArUr | | | | | |
| | UrGrGrUrC | | | | | |
| 1049 | AGGCCAGCTTGCC | +60 DNA | - | 100 | 20 | CCUUGUCAA |
| | GGTTTTTTAGTCGT | | | | | GGCUAUUGG |
| | GCTGCTTCATGTG | | | | | UC (SEQ ID |
| | TTTTTGTCAAAAG | | | | | NO: 1002) |
| | ACCTTTTrUrArArUr | | | | | |
| | UrUrCrUrArCrUrCrU | | | | | |
| | rUrGrUrArGrArUrCr | | | | | |
| | CrUrUrGrUrCrArArG | | | | | |
| | rGrCrUrArUrUrGrGr | | | | | |
| | UrC | | | | | |
| 1050 | ATGTGTTTTTGTCA | +25 DNA | 1xPS2- | 66 | 21 | CCUUGUCAA |
| | AAAGACCTTTTrUr | | OMe + | | | GGCUAUUGG |
| | ArArUrUrUrCrUrArC | | 1xOMe | | | UCA (SEQ ID |
| | rUrCrUrUrGrUrArGr | | | | | NO: 1254) |
| | ArUrCrCrUrUrGrUrC | | | | | |
| | rArArGrGrCrUrArUr | | | | | |
| | UrGrGrUmC/PS2/mA | | | | | |
| 1051 | ATGTGTTTTTGTCA | +25 DNA | 1xPS- | 66 | 21 | CCUUGUCAA |
| | AAAGACCTTTTrUr | | OMe | | | GGCUAUUGG |
| | ArArUrUrUrCrUrArC | | | | | UCA (SEQ ID |
| | rUrCrUrUrGrUrArGr | | | | | NO: 1254) |
| | ArUrCrCrUrUrGrUrC | | | | | |
| | rArArGrGrCrUrArUr | | | | | |
| | UrGrGrUrC*mA | | | | | |
| 1052 | TTTTTGTCAAAAG | +20 DNA | - | 60 | 20 | CCUUGUCAA |
| | ACCTTTTrUrArArUr | | | | | GGCUAUUGG |
| | UrUrCrUrArCrUrCrU | | | | | UC (SEQ ID |
| | rUrGrUrArGrArUrCr | | | | | NO: 1002) |
| | CrUrUrGrUrCrArArG | | | | | |
| | rGrCrUrArUrUrGrGr | | | | | |
| | UrC | | | | | |
| 1053 | GCTTCATGTGTTTT | +30 DNA | - | 70 | 20 | CCUUGUCAA |
| | TGTCAAAAGACCT | | | | | GGCUAUUGG |
| | TTTrUrArArUrUrUrC | | | | | UC (SEQ ID |
| | rUrArCrUrCrUrUrGr | | | | | NO: 1002) |
| | UrArGrArUrCrCrUrU | | | | | |
| | rGrUrCrArArGrGrCr | | | | | |
| | UrArUrUrGrGrUrC | | | | | |
| 1054 | GCCGGTTTTTTAG | +50 DNA | - | 90 | 20 | CCUUGUCAA |
| | TCGTGCTGCTTCA | | | | | GGCUAUUGG |
| | TGTGTTTTTGTCAA | | | | | UC (SEQ ID |
| | AAGACCTTTTrUrAr | | | | | NO: 1002) |
| | ArUrUrUrCrUrArCrU | | | | | |
| | rCrUrUrGrUrArGrAr | | | | | |
| | UrCrCrUrUrGrUrCrA | | | | | |
| | rArGrGrCrUrArUrUr | | | | | |
| | GrGrUrC | | | | | |
| 1055 | TAGTCGTGCTGCT | +40 DNA | - | 80 | 20 | CCUUGUCAA |
| | TCATGTGTTTTTGT | | | | | GGCUAUUGG |
| | CAAAAGACCTTTTr | | | | | UC (SEQ ID |
| | UrArArUrUrUrCrUrA | | | | | NO: 1002) |
| | rCrUrCrUrUrGrUrAr | | | | | |
| | GrArUrCrCrUrUrGrU | | | | | |
| | rCrArArGrGrCrUrAr | | | | | |
| | UrUrGrGrUrC | | | | | |
| 1056 | C*C*GAAGTTTTCT | +20 DNA + | - | 60 | 20 | CCUUGUCAA |
| | TCGGTTTTrUrArAr | 2xPS | | | | GGCUAUUGG |
| | UrUrUrCrUrArCrUrC | | | | | UC (SEQ ID |
| | rUrUrGrUrArGrArUr | | | | | NO: 1002) |
| | CrCrUrUrGrUrCrArA | | | | | |
| | rGrGrCrUrArUrUrGr | | | | | |
| | GrUrC | | | | | |
| 1057 | T*T*TTTCCGAAGT | +25 DNA + | - | 65 | 20 | CCUUGUCAA |
| | TTTCTTCGGTTTTr | 2xPS | | | | GGCUAUUGG |
| | UrArArUrUrUrCrUrA | | | | | UC (SEQ ID |
| | rCrUrCrUrUrGrUrAr | | | | | NO: 1002) |
| | GrArUrCrCrUrUrGrU | | | | | |
| | rCrArArGrGrCrUrAr | | | | | |
| | UrUrGrGrUrC | | | | | |
| 1058 | A*A*CGCTTTTTCC | +30 DNA + | - | 70 | 20 | CCUUGUCAA |
| | GAAGTTTTCTTCG | 2xPS | | | | GGCUAUUGG |
| | GTTTTrUrArArUrUr | | | | | UC (SEQ ID |
| | UrCrUrArCrUrCrUrU | | | | | NO: 1002) |
| | rGrUrArGrArUrCrCr | | | | | |
| | UrUrGrUrCrArArGrG | | | | | |
| | rCrUrArUrUrGrGrUr | | | | | |
| | C | | | | | |
| 1059 | G*C*GTTGTTTTCA | +41 DNA + | - | 81 | 20 | CCUUGUCAA |
| | ACGCTTTTTCCGA | 2xPS | | | | GGCUAUUGG |
| | AGTTTTCTTCGGTT | | | | | UC (SEQ ID |
| | TTrUrArArUrUrUrCr | | | | | NO: 1002) |
| | UrArCrUrCrUrUrGrU | | | | | |
| | rArGrArUrCrCrUrUr | | | | | |
| | GrUrCrArArGrGrCrU | | | | | |
| | rArUrUrGrGrUrC | | | | | |
| 1060 | G*G*CTTCTTTTGA | +62 DNA + | - | 102 | 20 | CCUUGUCAA |
| | AGCCTTTTTGCGTT | 2xPS | | | | GGCUAUUGG |
| | GTTTTCAACGCTTT | | | | | UC (SEQ ID |
| | TTCCGAAGTTTTCT | | | | | NO: 1002) |
| | TCGGTTTTrUrArAr | | | | | |
| | UrUrUrCrUrArCrUrC | | | | | |
| | rUrUrGrUrArGrArUr | | | | | |
| | CrCrUrUrGrUrCrArA | | | | | |
| | rGrGrCrUrArUrUrGr | | | | | |
| | GrUrC | | | | | |
| 1061 | mUrArArUrUrUrCrUr | 1xOMe | - | 40 | 20 | CCUUGUCAA |
| | ArCrUrCrUrUrGrUrA | | | | | GGCUAUUGG |
| | rGrArUrCrCrUrUrGr | | | | | UC (SEQ ID |
| | UrCrArArGrGrCrUrA | | | | | NO: 1002) |
| | rUrUrGrGrUrC | | | | | |
| 1062 | mU*rArArUrUrUrCr | 1xPS-OMe | - | 40 | 20 | CCUUGUCAA |
| | UrArCrUrCrUrUrGrU | | | | | GGCUAUUGG |
| | rArGrArUrCrCrUrUr | | | | | UC (SEQ ID |
| | GrUrCrArArGrGrCrU | | | | | NO: 1002) |
| | rArUrUrGrGrUrC | | | | | |
| 1063 | mUmArArUrUrUrCr | 2xOMe | - | 40 | 20 | CCUUGUCAA |
| | UrArCrUrCrUrUrGrU | | | | | GGCUAUUGG |
| | rArGrArUrCrCrUrUr | | | | | UC (SEQ ID |
| | GrUrCrArArGrGrCrU | | | | | NO: 1002) |
| | rArUrUrGrGrUrC | | | | | |
| 1064 | mU*mA*rArUrUrUr | 2xPS-OMe | - | 40 | 20 | CCUUGUCAA |
| | CrUrArCrUrCrUrUrG | | | | | GGCUAUUGG |
| | rUrArGrArUrCrCrUr | | | | | UC (SEQ ID |
| | UrGrUrCrArArGrGrC | | | | | NO: 1002) |
| | rUrArUrUrGrGrUrC | | | | | |
| 1065 | mUmAmArUrUrUrCr | 3xOMe | - | 40 | 20 | CCUUGUCAA |
| | UrArCrUrCrUrUrGrU | | | | | GGCUAUUGG |
| | rArGrArUrCrCrUrUr | | | | | UC (SEQ ID |
| | GrUrCrArArGrGrCrU | | | | | NO: 1002) |
| | rArUrUrGrGrUrC | | | | | |
| 1066 | mU*mA*mA*rUrUrU | 3xPS-OMe | - | 40 | 20 | CCUUGUCAA |
| | rCrUrArCrUrCrUrUr | | | | | GGCUAUUGG |
| | GrUrArGrArUrCrCrU | | | | | UC (SEQ ID |
| | rUrGrUrCrArArGrGr | | | | | NO: 1002) |
| | CrUrArUrUrGrGrUrC | | | | | |
| 1067 | A*T*GTGTTTTTGT | +25 DNA + | - | 65 | 20 | CCUUGUCAA |
| | CAAAAGACCTTTTr | 2xPS | | | | GGCUAUUGG |
| | UrArArUrUrUrCrUrA | | | | | UC (SEQ ID |
| | rCrUrCrUrUrGrUrAr | | | | | NO: 1002) |
| | GrArUrCrCrUrUrGrU | | | | | |
| | rCrArArGrGrCrUrAr | | | | | |
| | UrUrGrGrUrC | | | | | |
| 1068 | A*T*GTGTTTTTGT | +25 DNA + | 1xPS- | 66 | 21 | CCUUGUCAA |
| | CAAAAGACCTTTTr | 2xPS | OMe | | | GGCUAUUGG |
| | UrArArUrUrUrCrUrA | | | | | UCA (SEQ ID |
| | rCrUrCrUrUrGrUrAr | | | | | NO: 1254) |
| | GrArUrCrCrUrUrGrU | | | | | |
| | rCrArArGrGrCrUrAr | | | | | |
| | UrUrGrGrUrC*mA | | | | | |
| 1069 | rUrArArUrUrUrCrUr | - | 1xPS- | 41 | 21 | CCUUGUCAA |
| | ArCrUrCrUrUrGrUrA | | OMe | | | GGCUAUUGG |
| | rGrArUrCrCrUrUrGr | | | | | UCA (SEQ ID |
| | UrCrArArGrGrCrUrA | | | | | NO: 1254) |
| | rUrUrGrGrUrC*mA | | | | | |
| 1070 | rUrArArUrUrUrCrUr | - | 1xPS- | 42 | 21 | CCUUGUCAA |
| | ArCrUrCrUrUrGrUrA | | OMe + rU | | | GGCUAUUGG |
| | rGrArUrCrCrUrUrGr | | | | | UCA (SEQ ID |
| | UrCrArArGrGrCrUrA | | | | | NO: 1254) |
| | rUrUrGrGrUrCmA*r | | | | | |
| | U | | | | | |
| 1071 | rUrArArUrUrUrCrUr | - | rU | 41 | 20 | CCUUGUCAA |
| | ArCrUrCrUrUrGrUrA | | | | | GGCUAUUGG |
| | rGrArUrCrCrUrUrGr | | | | | UC (SEQ ID |
| | UrCrArArGrGrCrUrA | | | | | NO: 1002) |
| | rUrUrGrGrUrCrU | | | | | |
| 1072 | rUrArArUrUrUrCrUr | - | rU | 42 | 21 | CCUUGUCAA |
| | ArCrUrCrUrUrGrUrA | | | | | GGCUAUUGG |
| | rGrArUrCrCrUrUrGr | | | | | UCA (SEQ ID |
| | UrCrArArGrGrCrUrA | | | | | NO: 1254) |
| | rUrUrGrGrUrCrArU | | | | | |
| 1073 | rUrArArUrUrUrCrUr | - | rU | 44 | 23 | CCUUGUCAA |
| | ArCrUrCrUrUrGrUrA | | | | | GGCUAUUGG |
| | rGrArUrCrCrUrUrGr | | | | | UCAAG (SEQ |
| | UrCrArArGrGrCrUrA | | | | | ID NO: 1258) |
| | rUrUrGrGrUrCrArAr | | | | | |
| | GrU | | | | | |
| 1074 | A*T*GTGTTTTTGT | +25 DNA + | rU | 66 | 20 | CCUUGUCAA |
| | CAAAAGACCTTTTr | 2xPS | | | | GGCUAUUGG |
| | UrArArUrUrUrCrUrA | | | | | UC (SEQ ID |
| | rCrUrCrUrUrGrUrAr | | | | | NO: 1002) |
| | GrArUrCrCrUrUrGrU | | | | | |
| | rCrArArGrGrCrUrAr | | | | | |
| | UrUrGrGrUrCrU | | | | | |
| 1075 | A*T*GTGTTTTTGT | +25 DNA + | rU | 69 | 23 | CCUUGUCAA |
| | CAAAAGACCTTTTr | 2xPS | | | | GGCUAUUGG |
| | UrArArUrUrUrCrUrA | | | | | UCAAG (SEQ |
| | rCrUrCrUrUrGrUrAr | | | | | ID NO: 1258) |
| | GrArUrCrCrUrUrGrU | | | | | |
| | rCrArArGrGrCrUrAr | | | | | |
| | UrUrGrGrUrCrArArG | | | | | |
| | rU | | | | | |
| 1076 | rUrArArUrUrUrCrUr | - | - | 41 | 21 | CCUUGUCAA |
| | ArCrUrCrUrUrGrUrA | | | | | GGCUAUUGG |
| | rGrArUrCrCrUrUrGr | | | | | UCA (SEQ ID |
| | UrCrArArGrGrCrUrA | | | | | NO: 1254) |
| | rUrUrGrGrUrCrA | | | | | |
| 1077 | rUrArArUrUrUrCrUr | - | - | 43 | 23 | CCUUGUCAA |
| | ArCrUrCrUrUrGrUrA | | | | | GGCUAUUGG |
| | rGrArUrCrCrUrUrGr | | | | | UCAAG (SEQ |
| | UrCrArArGrGrCrUrA | | | | | ID NO: 1258) |
| | rUrUrGrGrUrCrArAr | | | | | |
| | G | | | | | |
| 1078 | A*T*GTGTTTTTGT | +25 DNA + | - | 68 | 23 | CCUUGUCAA |
| | CAAAAGACCTTTTr | 2xPS | | | | GGCUAUUGG |
| | UrArArUrUrUrCrUrA | | | | | UCAAG (SEQ |
| | rCrUrCrUrUrGrUrAr | | | | | ID NO: 1258) |
| | GrArUrCrCrUrUrGrU | | | | | |
| | rCrArArGrGrCrUrAr | | | | | |
| | UrUrGrGrUrCrArArG | | | | | |
| 1079 | rUrArArUrUrUrCrUr | - | 4xrU | 44 | 20 | CCUUGUCAA |
| | ArCrUrCrUrUrGrUrA | | | | | GGCUAUUGG |
| | rGrArUrCrCrUrUrGr | | | | | UC (SEQ ID |
| | UrCrArArGrGrCrUrA | | | | | NO: 1002) |
| | rUrUrGrGrUrCrUrUr | | | | | |
| | UrU | | | | | |
| 1080 | rUrArArUrUrUrCrUr | - | 3xPS- | 44 | 20 | CCUUGUCAA |
| | ArCrUrCrUrUrGrUrA | | OMe-U + | | | GGCUAUUGG |
| | rGrArUrCrCrUrUrGr | | rU | | | UC (SEQ ID |
| | UrCrArArGrGrCrUrA | | | | | NO: 1002) |
| | rUrUrGrGrUrCmU*m | | | | | |
| | U*mU*rU | | | | | |
| 1081 | A*T*GTGTTTTTGT | +25 DNA + | 4xrU | 69 | 20 | CCUUGUCAA |
| | CAAAAGACCTTTTr | 2xPS | | | | GGCUAUUGG |
| | UrArArUrUrUrCrUrA | | | | | UC (SEQ ID |
| | rCrUrCrUrUrGrUrAr | | | | | NO: 1002) |
| | GrArUrCrCrUrUrGrU | | | | | |
| | rCrArArGrGrCrUrAr | | | | | |
| | UrUrGrGrUrCrUrUrU | | | | | |
| | rU | | | | | |
| 1082 | AAAAAAAAAAAA | +25 A | 1xPS- | 66 | 21 | CCUUGUCAA |
| | AAAAAAAAAAAA | | OMe | | | GGCUAUUGG |
| | ArUrArArUrUrUrCrU | | | | | UCA (SEQ ID |
| | rArCrUrCrUrUrGrUr | | | | | NO: 1254) |
| | ArGrArUrCrCrUrUrG | | | | | |
| | rUrCrArArGrGrCrUr | | | | | |
| | ArUrUrGrGrUrC*mA | | | | | |
| 1083 | TTTTTTTTTTTTTTT | +25 T | 1xPS- | 66 | 21 | CCUUGUCAA |
| | TTTTTTTTTTrUrAr | | OMe | | | GGCUAUUGG |
| | ArUrUrUrCrUrArCrU | | | | | UCA (SEQ ID |
| | rCrUrUrGrUrArGrAr | | | | | NO: 1254) |
| | UrCrCrUrUrGrUrCrA | | | | | |
| | rArGrGrCrUrArUrUr | | | | | |
| | GrGrUrC*mA | | | | | |
| 1084 | C*C*GAAGTTTTCT | +20 DNA + | 1xPS- | 61 | 21 | CCUUGUCAA |
| | TCGGTTTTrUrArAr | 2×PS | OMe | | | GGCUAUUGG |
| | UrUrUrCrUrArCrUrC | | | | | UCA (SEQ ID |
| | rUrUrGrUrArGrArUr | | | | | NO: 1254) |
| | CrCrUrUrGrUrCrArA | | | | | |
| | rGrGrCrUrArUrUrGr | | | | | |
| | GrUrC*mA | | | | | |
| 1085 | rUrArArUrUrUrCrUr | - | 1xPS- | 41 | 21 | AGACAGAUA |
| | ArCrUrCrUrUrGrUrA | | OMe | | | UUUGCAUUG |
| | rGrArUrArGrArCrAr | | | | | AGA (SEQ ID |
| | GrArUrArUrUrUrGrC | | | | | NO: 1260) |
| | rArUrUrGrArG*mA | | | | | |
| 1086 | ATGTGTTTTTGTCA | +25 DNA | 1xPS- | 66 | 21 | AGACAGAUA |
| | AAAGACCTTTTrUr | | OMe | | | UUUGCAUUG |
| | ArArUrUrUrCrUrArC | | | | | AGA (SEQ ID |
| | rUrCrUrUrGrUrArGr | | | | | NO: 1260) |
| | ArUrArGrArCrArGrA | | | | | |
| | rUrArUrUrUrGrCrAr | | | | | |
| | UrUrGrArG*mA | | | | | |
| 1087 | C*C*GAAGTTTTCT | +20 DNA + | 1xPS- | 61 | 21 | AGACAGAUA |
| | TCGGTTTTrUrArAr | 2xPS | OMe | | | UUUGCAUUG |
| | UrUrUrCrUrArCrUrC | | | | | AGA (SEQ ID |
| | rUrUrGrUrArGrArUr | | | | | NO: 1260) |
| | ArGrArCrArGrArUrA | | | | | |
| | rUrUrUrGrCrArUrUG | | | | | |
| | rArG*mA | | | | | |
| 1088 | rUrArArUrUrUrCrUr | - | 1xPS- | 41 | 21 | CAUUGAGAU |
| | ArCrUrCrUrUrGrUrA | | OMe | | | AGUGUGGGG |
| | rGrArUrCrArUrUrGr | | | | | AAG (SEQ ID |
| | ArGrArUrArGrUrGrU | | | | | NO: 1262) |
| | rGrGrGrGrArA*mG | | | | | |
| 1089 | ATGTGTTTTTGTCA | +25 DNA | 1xPS- | 66 | 21 | CAUUGAGAU |
| | AAAGACCTTTTrUr | | OMe | | | AGUGUGGGG |
| | ArArUrUrUrCrUrArC | | | | | AAG (SEQ ID |
| | rUrCrUrUrGrUrArGr | | | | | NO: 1262) |
| | ArUrCrArUrUrGrArG | | | | | |
| | rArUrArGrUrGrUrGr | | | | | |
| | GrGrGrArA*mG | | | | | |
| 1090 | C*C*GAAGTTTTCT | +20 DNA + | 1xPS- | 61 | 21 | CAUUGAGAU |
| | TCGGTTTTrUrArAr | 2xPS | OMe | | | AGUGUGGGG |
| | UrUrUrCrUrArCrUrC | | | | | AAG (SEQ ID |
| | rUrUrGrUrArGrArUr | | | | | NO: 1262) |
| | CrArUrUrGrArGrArU | | | | | |
| | rArGrUrGrUrGrGrGr | | | | | |
| | GrArA*mG | | | | | |
| 1091 | rUrArArUrUrUrCrUr | - | 1xPS- | 41 | 21 | CUUCUCCCAU |
| | ArCrUrCrUrUrGrUrA | | OMe | | | CAUAGAGGA |
| | rGrArUrCrUrUrCrUr | | | | | UA (SEQ ID |
| | CrCrCrArUrCrArUrA | | | | | NO: 1264) |
| | rGrArGrGrArU*mA | | | | | |
| 1092 | ATGTGTTTTTGTCA | +25 DNA | 1xPS- | 66 | 21 | CUUCUCCCAU |
| | AAAGACCTTTTrUr | | OMe | | | CAUAGAGGA |
| | ArArUrUrUrCrUrArC | | | | | UA (SEQ ID |
| | rUrCrUrUrGrUrArGr | | | | | NO: 1264) |
| | ArUrCrUrUrCrUrCrC | | | | | |
| | rCrArUrCrArUrArGr | | | | | |
| | ArGrGrArU*mA | | | | | |
| 1093 | C*C*GAAGTTTTCT | +20 DNA + | 1xPS- | 61 | 21 | CUUCUCCCAU |
| | TCGGTTTTrUrArAr | 2xPS | OMe | | | CAUAGAGGA |
| | UrUrUrCrUrArCrUrC | | | | | UA (SEQ ID |
| | rUrUrGrUrArGrArUr | | | | | NO: 1264) |
| | CrUrUrCrUrCrCrCrA | | | | | |
| | rUrCrArUrArGrArGr | | | | | |
| | GrArU*mA | | | | | |
| 1098 | A*T*GTGTTTTTGT | +25 DNA + | 1xPS- | 67 | 21 | CCUUGUCAA |
| | CAAAAGACCTTTTr | 2xPS | OMe + rU | | | GGCUAUUGG |
| | UrArArUrUrUrCrUrA | | | | | UCA (SEQ ID |
| | rCrUrCrUrUrGrUrAr | | | | | NO: 1254) |
| | GrArUrCrCrUrUrGrU | | | | | |
| | rCrArArGrGrCrUrAr | | | | | |
| | UrUrGrGrUrCmA*rU | | | | | |
| 1099 | A*T*GTGTTTTTGT | +25 DNA + | 2xPS- | 68 | 22 | CCUUGUCAA |
| | CAAAAGACCTTTTr | 2xPS | OMe + rU | | | GGCUAUUGG |
| | UrArArUrUrUrCrUrA | | | | | UCAA (SEQ ID |
| | rCrUrCrUrUrGrUrAr | | | | | NO: 1256) |
| | GrArUrCrCrUrUrGrU | | | | | |
| | rCrArArGrGrCrUrAr | | | | | |
| | UrUrGrGrUrCmA*m | | | | | |
| | A*rU | | | | | |
| 1100 | A*T*GTGTTTTTGT | +25 DNA + | 1xPS- | 66 | 20 | CCUUGUCAA |
| | CAAAAGACCTTTTr | 2xPS | OMe + rU | | | GGCUAUUGG |
| | UrArArUrUrUrCrUrA | | | | | UC (SEQ ID |
| | rCrUrCrUrUrGrUrAr | | | | | NO: 1002) |
| | GrArUrCrCrUrUrGrU | | | | | |
| | rCrArArGrGrCrUrAr | | | | | |
| | UrUrGrGrUmC*rU | | | | | |
| 1101 | A*T*GTGTTTTTGT | +25 DNA + | 1xPS- | 65 | 20 | CCUUGUCAA |
| | CAAAAGACCTTTTr | 2xPS | OMe | | | GGCUAUUGG |
| | UrArArUrUrUrCrUrA | | | | | UC (SEQ ID |
| | rCrUrCrUrUrGrUrAr | | | | | NO: 1002) |
| | GrArUrCrCrUrUrGrU | | | | | |
| | rCrArArGrGrCrUrAr | | | | | |
| | UrUrGrGrU*mC | | | | | |
| 1102 | A*T*GTGTTTTTGT | +25 DNA + | 2xPS- | 67 | 22 | CCUUGUCAA |
| | CAAAAGACCTTTTr | 2xPS | OMe | | | GGCUAUUGG |
| | UrArArUrUrUrCrUrA | | | | | UCAA (SEQ ID |
| | rCrUrCrUrUrGrUrAr | | | | | NO: 1256) |
| | GrArUrCrCrUrUrGrU | | | | | |
| | rCrArArGrGrCrUrAr | | | | | |
| | UrUrGrGrUrC*mA* | | | | | |
| | mA | | | | | |
| 1103 | mA*mU*rGrUrGrUr | +25 RNA + | 1xPS- | 66 | 21 | CCUUGUCAA |
| | UrUrUrUrGrUrCrArA | 2×PS | OMe | | | GGCUAUUGG |
| | rArArGrArCrCrUrUr | | | | | UCA (SEQ ID |
| | UrUrUrArArUrUrUrC | | | | | NO: 1254) |
| | rUrArCrUrCrUrUrGr | | | | | |
| | UrArGrArUrCrCrUrU | | | | | |
| | rGrUrCrArArGrGrCr | | | | | |
| | UrArUrUrGrGrUrC* | | | | | |
| | mA | | | | | |
| 1104 | mA*mA*rArArArAr | PolyA RNA + | 1xPS- | 66 | 21 | CCUUGUCAA |
| | ArArArArArArArArA | 2xPS | OMe | | | GGCUAUUGG |
| | rArArArArArArArAr | | | | | UCA (SEQ ID |
| | ArArUrArArUrUrUrC | | | | | NO: 1254) |
| | rUrArCrUrCrUrUrGr | | | | | |
| | UrArGrArUrCrCrUrU | | | | | |
| | rGrUrCrArArGrGrCr | | | | | |
| | UrArUrUrGrGrUrC* | | | | | |
| | mA | | | | | |
| 1105 | mU*mU*rUrUrUrUr | PolyU RNA + | 1xPS- | 66 | 21 | CCUUGUCAA |
| | UrUrUrUrUrUrUrUrU | 2xPS | OMe | | | GGCUAUUGG |
| | rUrUrUrUrUrUrUrUr | | | | | UCA (SEQ ID |
| | UrUrUrArArUrUrUrC | | | | | NO: 1254) |
| | rUrArCrUrCrUrUrGr | | | | | |
| | UrArGrArUrCrCrUrU | | | | | |
| | rGrUrCrArArGrGrCr | | | | | |
| | UrArUrUrGrGrUrC* | | | | | |
| | mA | | | | | |

All bases are in upper case
Lowercase “r” represents RNA, 2′-hydroxy; bases notmodified by an “r” are DNA
All bases are linked via standard phosphodiester bonds except as noted:
“*” represents phosphorothioatemodification
“PS” represents phosphorothioate modification
“PS2” represents phosphorodithioate modification
“OMe” represents a 2′-o-methylmodification
“m” represents a 2′-o-methylmodification
**Table 24 provides a listing of the sequences of the gRNA 5′ extensions

### SEQUENCES

[0442] Genome editing system components according to the present disclosure (including without limitation, RNA-guided nucleases, guide RNAs, donor template nucleic acids, nucleic acids encoding nucleases or guide RNAs, and portions or fragments of any of the foregoing), are exemplified by the nucleotide and amino acid sequences presented in the Sequence Listing. The sequences presented in the Sequence Listing are not intended to be limiting, but rather illustrative of certain principles of genome editing systems and their component parts, which, in combination with the instant disclosure, will inform those of skill in the art about additional implementations and modifications that are within the scope of this disclosure. A list of the sequences presented is provided in the following Table 25.

TABLE 25
Sequences presented in the Sequence Listing:

| SEQ ID NOS: | DESCRIPTION |
|---|---|
| 1-2, 4-6, | Cas9 polypeptides |
| 12, 14 | |
| 3, 7-11, 13 | Cas9 coding sequences |
| 15-23, | Cas9 RuvC-like domains |
| 52-123 | |
| 24-28, | Cas9 HNH-like domains |
| 124-198 | |
| 29-31, | Full-length modular and |
| 38-51 | unimolecular gRNAs |
| 32-37 | gRNA proximal and tail domains |
| 199-205 | PAM sequences |
| 251-901, | gRNA targeting domains (RNA)- |
| 1002 | see Table 2, 19, 22, 23 |
| 910-919, | gRNA targeting domains (DNA)- |
| 943-945, | see Tables 7, 9 |
| 956-959, | |
| 1003 | |
| 920-929, | gRNA targeting domains plus PAM |
| 946-948, | (NGG) (RNA)-see Tables 7, 9 |
| 960-963, | |
| 1004 | |
| 930-939, | gRNA targeting domains plus PAM |
| 949-951, | (NGG) (DNA)-see Tables 7, 9 |
| 964-967, | |
| 1005 | |
| 970, 971, | gRNA sequences (DNA)- |
| 996, 997 | see Tables 10, 12 |
| 972, 973, | gRNA sequences (DNA)- |
| 998, 999 | see Tables 10, 12 |
| 902, 903 | Human HBG1 and HBG2 promoter |
| | sequences including HPFH |
| | deletion site |
| 904-909, | Oligonucleotide donor sequences |
| 974-995 | and homology arms-see Tables 8, 11 |
| 968-969 | BCL11Ae sequences |
| 1006, 1007 | Nuclear Localization Signal sequences |
| 1000, 1001, | Cpf1 polypeptide sequences |
| 1008-1018 | |
| 1032-1039 | |
| 1094-1097, | |
| 1107-1109 | |
| 1019-1021 | Cpf1 nucleotide sequences |
| 1110-1117 | |

### INCORPORATION BY REFERENCE

[0443] All publications, patents, and patent applications mentioned herein are hereby incorporated by reference in their entirety as if each individual publication, patent or patent application was specifically and individually indicated to be incorporated by reference. In case of conflict, the present application, including any definitions herein, will control.

### EQUIVALENTS

[0444] Those skilled in the art will recognize, or be able to ascertain using no more than routine experimentation, many equivalents to the specific embodiments described herein. Such equivalents are intended to be encompassed by the following claims.

### REFERENCES

[0445] Ahern et al., Br J Haematol 25 (4): 437-444 (1973)
[0446] Akinbami Hemoglobin 40:64-65 (2016)
[0447] Aliyu et al. Am J Hematol 83:63-70 (2008)
[0448] Anders et al. Nature 513 (7519): 569-573 (2014)
[0449] Angastiniotis & Modell Ann N Y Acad Sci 850:251-269 (1998)
[0450] Bae et al. Bioinformatics 30 (10): 1473-1475 (2014)
[0451] Barbosa et al. Braz J Med Bio Res 43 (8): 705-711 (2010)
[0452] Bouva Hematologica 91 (1): 129-132 (2006)
[0453] Briner et al. Mol Cell 56 (2): 333-339 (2014)
[0454] Brousseau Am J Hematol 85 (1): 77-78 (2010)
[0455] Caldecott Nat Rev Genet 9 (8): 619-631 (2008)
[0456] Canvers et al. Nature 527 (12): 192-197 (2015)
[0457] Chang et al. Mol Ther Methods Clin Dev 4:137-148 (2017)
[0458] Chassanidis Ann Hematol 88 (6): 549-555 (2009)
[0459] Chylinski et al. RNA Biol 10 (5): 726-737 (2013)
[0460] Cong et al. Science 399 (6121): 819-823 (2013)
[0461] Costa et al., Cad Saude Publica 18 (5): 1469-1471 (2002)
[0462] Davis & Maizels 2 Proc Natl Acad Sci USA 111 (10): E924-932 (2014)
[0463] Fine et al. Sci Rep. 5:10777 (2015)
[0464] Frit et al. DNA Repair (Amst) 17:81-97 (2014)
[0465] Fu et al. Nat Biotechnol 32:279-284 (2014)
[0466] Gao et al. Nat Biotechnol.: 35 (8): 789-792 (2017)
[0467] Giarratana et al. Blood: 118, 5071-5079 (2011)
[0468] Guilinger et al. Nat Biotechnol 32:577-582 (2014)
[0469] Heigwer et al. Nat Methods 11 (2): 122-123 (2014)
[0470] Hsu et al. Nat Biotechnol 31 (9): 827-832 (2013)
[0471] Iyama & Wilson DNA Repair (Amst) 12 (8): 620-636 (2013)
[0472] Jiang et al. Nat Biotechnol 31 (3): 233-239 (2013)
[0473] Jinek et al. Science 337 (6096): 816-821 (2012)
[0474] Jinek et al. Science 343 (6176): 1247997 (2014)
[0475] Kleinstiver et al. Nature 523 (7561): 481-485 (2015a)
[0476] Kleinstiver et al. Nat Biotechnol 33 (12): 1293-1298 (2015b)
[0477] Kleinstiver et al. Nature 529 (7587): 490-495 (2016)
[0478] Komor et al. Nature 533 (7603): 420-424 (2016)
[0479] Lee et al. Nano Lett 12 (12): 6322-6327 (2012)
[0480] Lewis “Medical-Surgical Nursing: Assessment and Management of Clinical Problems” (2014)
[0481] Li Cell Res 18 (1): 85-98 (2008)
[0482] Makarova et al. Nat Rev Microbiol 9 (6): 467-477 (2011)
[0483] Mali et al. Science 339 (6121): 823-826 (2013)
[0484] Mantovani et al. Nucleic Acids Res 16 (16): 7783-7797 (1988)
[0485] Marteijn et al. Nat Rev Mol Cell Biol 15 (7): 465-481 (2014)
[0486] Martyn et al., Biochim Biophys Acta 1860 (5): 525-536 (2017)
[0487] Nishimasu et al. Cell 156 (5): 935-949 (2014)
[0488] Nishimasu et al. Cell 162:1113-1126 (2015)
[0489] Notta et al. Science 333 (6039): 218-21 (2011)
[0490] Ran & Hsu Cell 154 (6): 1380-1389 (2013)
[0491] Richardson et al. Nat Biotechnol 34:339-344 (2016)
[0492] Shmakov et al. Molecular Cell 60 (3): 385-397 (2015)
[0493] Sternberg et al. Nature 507 (7490): 62-67 (2014)
[0494] Superti-Furga et al. EMBO J 7 (10): 3099-3107 (1988)
[0495] Thein Hum Mol Genet 18 (R2): R216-223 (2009)
[0496] Tsai et al. Nat Biotechnol 34 (5): 483 (2016)
[0497] Waber et al. Blood 67 (2): 551-554 (1986)
[0498] Wang et al. Cell 153 (4): 910-918 (2013)
[0499] Xiao et al. Bioinformatics 30 (8): 1180-1182 (2014)
[0500] Xu et al. Genes Dev 24 (8): 783-798 (2010)
[0501] Yamano et al. Cell 165 (4): 949-962 (2016)
[0502] Zetsche et al. Nat Biotechnol 33 (2): 139-42 (2015)

The application's sequence listing, which the Patent Office published only in electronic form, follows.

SEQUENCE LISTING (1270 sequences)

SEQ ID NO: 1 - protein, 1345 aa, Streptococcus mutans
  REGION 10..21: note = misc_feature - N-terminal RuvC-like domain
  REGION 759..766: note = misc_feature - RuvC-like domain
  REGION 837..863: note = misc_feature - HNH-like domain
  REGION 982..989: note = misc_feature - RuvC-like domain
MKKPYSIGLDIGTNSVGWAVVTDDYKVPAKKMKVLGNTDKSHIEKNLLGALLFDSGNTAEDRRLKRTARRRYTRRRNRILYLQEIFSEEMGKVDDSFFHRLEDSFLVTEDKRGERHPIFGNLEEEVKYHENFPTIYHLRQYLADNPEKVDLRLVYLALAHIIKFRGHFLIEGKFDTRNNDVQRLFQEFLAVYDNTFENSSLQEQNVQVEEILTDKISKSAKKDRVLKLFPNEKSNGRFAEFLKLIVGNQADFKKHFELEEKAPLQFSKDTYEEELEVLLAQIGDNYAELFLSAKKLYDSILLSGILTVTDVGTKAPLSASMIQRYNEHQMDLAQLKQFIRQKLSDKYNEVFSDVSKDGYAGYIDGKTNQEAFYKYLKGLLNKIEGSGYFLDKIEREDFLRKQRTFDNGSIPHQIHLQEMRAIIRRQAEFYPFLADNQDRIEKLLTFRIPYYVGPLARGKSDFAWLSRKSADKITPWNFDEIVDKESSAEAFINRMTNYDLYLPNQKVLPKHSLLYEKFTVYNELTKVKYKTEQGKTAFFDANMKQEIFDGVFKVYRKVTKDKLMDFLEKEFDEFRIVDLTGLDKENKVFNASYGTYHDLCKILDKDFLDNSKNEKILEDIVLTLTLFEDREMIRKRLENYSDLLTKEQVKKLERRHYTGWGRLSAELIHGIRNKESRKTILDYLIDDGNSNRNFMQLINDDALSFKEEIAKAQVIGETDNLNQVVSDIAGSPAIKKGILQSLKIVDELVKIMGHQPENIVVEMARENQFTNQGRRNSQQRLKGLTDSIKEFGSQILKEHPVENSQLQNDRLFLYYLQNGRDMYTGEELDIDYLSQYDIDHIIPQAFIKDNSIDNRVLTSSKENRGKSDDVPSKDVVRKMKSYWSKLLSAKLITQRKFDNLTKAERGGLTDDDKAGFIKRQLVETRQITKHVARILDERFNTETDENNKKIRQVKIVTLKSNLVSNFRKEFELYKVREINDYHHAHDAYLNAVIGKALLGVYPQLEPEFVYGDYPHFHGHKENKATAKKFFYSNIMNFFKKDDVRTDKNGEIIWKKDEHISNIKKVLSYPQVNIVKKVEEQTGGFSKESILPKGNSDKLIPRKTKKFYWDTKKYGGFDSPIVAYSILVIADIEKGKSKKLKTVKALVGVTIMEKMTFERDPVAFLERKGYRNVQEENIIKLPKYSLFKLENGRKRLLASARELQKGNEIVLPNHLGTLLYHAKNIHKVDEPKHLDYVDKHKDEFKELLDVVSNFSKKYTLAEGNLEKIKELYAQNNGEDLKELASSFINLLTFTAIGAPATFKFFDKNIDRKRYTSTTEILNATLIHQSITGLYETRIDLNKLGGD

SEQ ID NO: 2 - protein, 1368 aa, Streptococcus pyogenes [sequence omitted]

SEQ ID NO: 3 - DNA, 4107 bp, Streptococcus pyogenes
  source 1..4107: mol_type = other DNA
atggataaaaagtacagcatcgggctggacatcggtacaaactcagtggggtgggccgtgattacggacgagtacaaggtaccctccaaaaaatttaaagtgctgggtaacacggacagacactctataaagaaaaatcttattggagccttgctgttcgactcaggcgagacagccgaagccacaaggttgaagcggaccgccaggaggcggtataccaggagaaagaaccgcatatgctacctgcaagaaatcttcagtaacgagatggcaaaggttgacgatagctttttccatcgcctggaagaatcctttcttgttgaggaagacaagaagcacgaacggcaccccatctttggcaatattgtcgacgaagtggcatatcacgaaaagtacccgactatctaccacctcaggaagaagctggtggactctaccgataaggcggacctcagacttatttatttggcactcgcccacatgattaaatttagaggacatttcttgatcgagggcgacctgaacccggacaacagtgacgtcgataagctgttcatccaacttgtgcagacctacaatcaactgttcgaagaaaaccctataaatgcttcaggagtcgacgctaaagcaatcctgtccgcgcgcctctcaaaatctagaagacttgagaatctgattgctcagttgcccggggaaaagaaaaatggattgtttggcaacctgatcgccctcagtctcggactgaccccaaatttcaaaagtaacttcgacctggccgaagacgctaagctccagctgtccaaggacacatacgatgacgacctcgacaatctgctggcccagattggggatcagtacgccgatctctttttggcagcaaagaacctgtccgacgccatcctgttgagcgatatcttgagagtgaacaccgaaattactaaagcaccccttagcgcatctatgatcaagcggtacgacgagcatcatcaggatctgaccctgctgaaggctcttgtgaggcaacagctccccgaaaaatacaaggaaatcttctttgaccagagcaaaaacggctacgctggctatatagatggtggggccagtcaggaggaattctataaattcatcaagcccattctcgagaaaatggacggcacagaggagttgctggtcaaacttaacagggaggacctgctgcggaagcagcggacctttgacaacgggtctatcccccaccagattcatctgggcgaactgcacgcaatcctgaggaggcaggaggatttttatccttttcttaaagataaccgcgagaaaatagaaaagattcttacattcaggatcccgtactacgtgggacctctcgcccggggcaattcacggtttgcctggatgacaaggaagtcagaggagactattacaccttggaacttcgaagaagtggtggacaagggtgcatctgcccagtctttcatcgagcggatgacaaattttgacaagaacctccctaatgagaaggtgctgcccaaacattctctgctctacgagtactttaccgtctacaatgaactgactaaagtcaagtacgtcaccgagggaatgaggaagccggcattccttagtggagaacagaagaaggcgattgtagacctgttgttcaagaccaacaggaaggtgactgtgaagcaacttaaagaagactactttaagaagatcgaatgttttgacagtgtggaaatttcaggggttgaagaccgcttcaatgcgtcattggggacttaccatgatcttctcaagatcataaaggacaaagacttcctggacaacgaagaaaatgaggatattctcgaagacatcgtcctcaccctgaccctgttcgaagacagggaaatgatagaagagcgcttgaaaacctatgcccacctcttcgacgataaagttatgaagcagctgaagcgcaggagatacacaggatggggaagattgtcaaggaagctgatcaatggaattagggataaacagagtggcaagaccatactggatttcctcaaatctgatggcttcgccaataggaacttcatgcaactgattcacgatgactctcttaccttcaaggaggacattcaaaaggctcaggtgagcgggcagggagactcccttcatgaacacatcgcgaatttggcaggttcccccgctattaaaaagggcatccttcaaactgtcaaggtggtggatgaattggtcaaggtaatgggcagacataagccagaaaatattgtgatcgagatggcccgcgaaaaccagaccacacagaagggccagaaaaatagtagagagcggatgaagaggatcgaggagggcatcaaagagctgggatctcagattctcaaagaacaccccgtagaaaacacacagctgcagaacgaaaaattgtacttgtactatctgcagaacggcagagacatgtacgtcgaccaagaacttgatattaatagactgtccgactatgacgtagaccatatcgtgccccagtccttcctgaaggacgactccattgataacaaagtcttgacaagaagcgacaagaacaggggtaaaagtgataatgtgcctagcgaggaggtggtgaaaaaaatgaagaactactggcgacagctgcttaatgcaaagctcattacacaacggaagttcgataatctgacgaaagcagagagaggtggcttgtctgagttggacaaggcagggtttattaagcggcagctggtggaaactaggcagatcacaaagcacgtggcgcagattttggacagccggatgaacacaaaatacgacgaaaatgataaactgatacgagaggtcaaagttatcacgctgaaaagcaagctggtgtccgattttcggaaagacttccagttctacaaagttcgcgagattaataactaccatcatgctcacgatgcgtacctgaacgctgttgtcgggaccgccttgataaagaagtacccaaagctggaatccgagttcgtatacggggattacaaagtgtacgatgtgaggaaaatgatagccaagtccgagcaggagattggaaaggccacagctaagtacttcttttattctaacatcatgaatttttttaagacggaaattaccctggccaacggagagatcagaaagcggccccttatagagacaaatggtgaaacaggtgaaatcgtctgggataagggcagggatttcgctactgtgaggaaggtgctgagtatgccacaggtaaatatcgtgaaaaaaaccgaagtacagaccggaggattttccaaggaaagcattttgcctaaaagaaactcagacaagctcatcgcccgcaagaaagattgggaccctaagaaatacgggggatttgactcacccaccgtagcctattctgtgctggtggtagctaaggtggaaaaaggaaagtctaagaagctgaagtccgtgaaggaactcttgggaatcactatcatggaaagatcatcctttgaaaagaaccctatcgatttcctggaggctaagggttacaaggaggtcaagaaagacctcatcattaaactgccaaaatactctctcttcgagctggaaaatggcaggaagagaatgttggccagcgccggagagctgcaaaagggaaacgagcttgctctgccctccaaatatgttaattttctctatctcgcttcccactatgaaaagctgaaagggtctcccgaagataacgagcagaagcagctgttcgtcgaacagcacaagcactatctggatgaaataatcgaacaaataagcgagttcagcaaaagggttatcctggcggatgctaatttggacaaagtactgtctgcttataacaagcaccgggataagcctattagggaacaagccgagaatataattcacctctttacactcacgaatctcggagcccccgccgccttcaaatactttgatacgactatcgaccggaaacggtataccagtaccaaagaggtcctcgatgccaccctcatccaccagtcaattactggcctgtacgaaacacggatcgacctctctcaactgggcggcgactag

SEQ ID NO: 4 - protein, 1388 aa, Streptococcus thermophilus
  REGION 10..21: note = misc_feature - N-terminal RuvC-like domain
  REGION 760..767: note = misc_feature - RuvC-like domain
  REGION 844..870: note = misc_feature - HNH-like domain
  REGION 989..996: note = misc_feature - RuvC-like domain
MTKPYSIGLDIGTNSVGWAVTTDNYKVPSKKMKVLGNTSKKYIKKNLLGVLLFDSGITAEGRRLKRTARRRYTRRRNRILYLQEIFSTEMATLDDAFFQRLDDSFLVPDDKRDSKYPIFGNLVEEKAYHDEFPTIYHLRKYLADSTKKADLRLVYLALAHMIKYRGHFLIEGEFNSKNNDIQKNFQDFLDTYNAIFESDLSLENSKQLEEIVKDKISKLEKKDRILKLFPGEKNSGIFSEFLKLIVGNQADFRKCFNLDEKASLHFSKESYDEDLETLLGYIGDDYSDVFLKAKKLYDAILLSGFLTVTDNETEAPLSSAMIKRYNEHKEDLALLKEYIRNISLKTYNEVFKDDTKNGYAGYIDGKTNQEDFYVYLKKLLAEFEGADYFLEKIDREDFLRKQRTFDNGSIPYQIHLQEMRAILDKQAKFYPFLAKNKERIEKILTFRIPYYVGPLARGNSDFAWSIRKRNEKITPWNFEDVIDKESSAEAFINRMTSFDLYLPEEKVLPKHSLLYETFNVYNELTKVRFIAESMRDYQFLDSKQKKDIVRLYFKDKRKVTDKDIIEYLHAIYGYDGIELKGIEKQFNSSLSTYHDLLNIINDKEFLDDSSNEAIIEEIIHTLTIFEDREMIKQRLSKFENIFDKSVLKKLSRRHYTGWGKLSAKLINGIRDEKSGNTILDYLIDDGISNRNFMQLIHDDALSFKKKIQKAQIIGDEDKGNIKEVVKSLPGSPAIKKGILQSIKIVDELVKVMGGRKPESIVVEMARENQYTNQGKSNSQQRLKRLEKSLKELGSKILKENIPAKLSKIDNNALQNDRLYLYYLQNGKDMYTGDDLDIDRLSNYDIDHIIPQAFLKDNSIDNKVLVSSASNRGKSDDVPSLEVVKKRKTFWYQLLKSKLISQRKFDNLTKAERGGLSPEDKAGFIQRQLVETRQITKHVARLLDEKFNNKKDENNRAVRTVKIITLKSTLVSQFRKDFELYKVREINDFHHAHDAYLNAVVASALLKKYPKLEPEFVYGDYPKYNSFRERKSATEKVYFYSNIMNIFKKSISLADGRVIERPLIEVNEETGESVWNKESDLATVRRVLSYPQVNVVKKVEEQNHGLDRGKPKGLFNANLSSKPKPNSNENLVGAKEYLDPKKYGGYAGISNSFTVLVKGTIEKGAKKKITNVLEFQGISILDRINYRKDKLNFLLEKGYKDIELIIELPKYSLFELSDGSRRMLASILSTNNKRGEIHKGNQIFLSQKFVKLLYHAKRISNTINENHRKYVENHKKEFEELFYYILEFNENYVGAKKNGKLLNSAFQSWQNHSIDELCSSFIGPTGSERKGLFELTSRGSAADFEFLGVKIPRYRDYTPSSLLKDATLIHQSVTGLYETRIDLAKLGEG

SEQ ID NO: 5 - protein, 1334 aa, Listeria innocua
  REGION 10..21: note = misc_feature - N-terminal RuvC-like domain
  REGION 762..769: note = misc_feature - RuvC-like domain
  REGION 840..866: note = misc_feature - HNH-like domain
  REGION 985..992: note = misc_feature - RuvC-like domain
MKKPYTIGLDIGTNSVGWAVLTDQYDLVKRKMKIAGDSEKKQIKKNFWGVRLFDEGQTAADRRMARTARRRIERRRNRISYLQGIFAEEMSKTDANFFCRLSDSFYVDNEKRNSRHPFFATIEEEVEYHKNYPTIYHLREELVNSSEKADLRLVYLALAHIIKYRGNFLIEGALDTQNTSVDGIYKQFIQTYNQVFASGIEDGSLKKLEDNKDVAKILVEKVTRKEKLERILKLYPGEKSAGMFAQFISLIVGSKGNFQKPFDLIEKSDIECAKDSYEEDLESLLALIGDEYAELFVAAKNAYSAVVLSSIITVAETETNAKLSASMIERFDTHEEDLGELKAFIKLHLPKHYEEIFSNTEKHGYAGYIDGKTKQADFYKYMKMTLENIEGADYFIAKIEKENFLRKQRTFDNGAIPHQLHLEELEAILHQQAKYYPFLKENYDKIKSLVTFRIPYFVGPLANGQSEFAWLTRKADGEIRPWNIEEKVDFGKSAVDFIEKMTNKDTYLPKENVLPKHSLCYQKYLVYNELTKVRYINDQGKTSYFSGQEKEQIFNDLFKQKRKVKKKDLELFLRNMSHVESPTIEGLEDSFNSSYSTYHDLLKVGIKQEILDNPVNTEMLENIVKILTVFEDKRMIKEQLQQFSDVLDGVVLKKLERRHYTGWGRLSAKLLMGIRDKQSHLTILDYLMNDDGLNRNLMQLINDSNLSFKSIIEKEQVTTADKDIQSIVADLAGSPAIKKGILQSLKIVDELVSVMGYPPQTIVVEMARENQTTGKGKNNSRPRYKSLEKAIKEFGSQILKEHPTDNQELRNNRLYLYYLQNGKDMYTGQDLDIHNLSNYDIDHIVPQSFITDNSIDNLVLTSSAGNREKGDDVPPLEIVRKRKVFWEKLYQGNLMSKRKFDYLTKAERGGLTEADKARFIHRQLVETRQITKNVANILHQRFNYEKDDHGNTMKQVRIVTLKSALVSQFRKQFQLYKVRDVNDYHHAHDAYLNGVVANTLLKVYPQLEPEFVYGDYHQFDWFKANKATAKKQFYTNIMLFFAQKDRIIDENGEILWDKKYLDTVKKVMSYRQMNIVKKTEIQKGEFSKATIKPKGNSSKLIPRKTNWDPMKYGGLDSPNMAYAVVIEYAKGKNKLVFEKKIIRVTIMERKAFEKDEKAFLEEQGYRQPKVLAKLPKYTLYECEEGRRRMLASANEAQKGNQQVLPNHLVTLLHHAANCEVSDGKSLDYIESNREMFAELLAHVSEFAKRYTLAEANLNKINQLFEQNKEGDIKAIAQSFVDLMAFNAMGAPASFKFFETTIERKRYNNLKELLNSTIIYQSITGLYESRKRLDD

SEQ ID NO: 6 - protein, 1053 aa, Staphylococcus aureus
MKRNYILGLDIGITSVGYGIIDYETRDVIDAGVRLFKEANVENNEGRRSKRGARRLKRRRRHRIQRVKKLLFDYNLLTDHSELSGINPYEARVKGLSQKLSEEEFSAALLHLAKRRGVHNVNEVEEDTGNELSTKEQISRNSKALEEKYVAELQLERLKKDGEVRGSINRFKTSDYVKEAKQLLKVQKAYHQLDQSFIDTYIDLLETRRTYYEGPGEGSPFGWKDIKEWYEMLMGHCTYFPEELRSVKYAYNADLYNALNDLNNLVITRDENEKLEYYEKFQIIENVFKQKKKPTLKQIAKEILVNEEDIKGYRVTSTGKPEFTNLKVYHDIKDITARKEIIENAELLDQIAKILTIYQSSEDIQEELTNLNSELTQEEIEQISNLKGYTGTHNLSLKAINLILDELWHTNDNQIAIFNRLKLVPKKVDLSQQKEIPTTLVDDFILSPVVKRSFIQSIKVINAIIKKYGLPNDIIIELAREKNSKDAQKMINEMQKRNRQTNERIEEIIRTTGKENAKYLIEKIKLHDMQEGKCLYSLEAIPLEDLLNNPFNYEVDHIIPRSVSFDNSFNNKVLVKQEENSKKGNRTPFQYLSSSDSKISYETFKKHILNLAKGKGRISKTKKEYLLEERDINRFSVQKDFINRNLVDTRYATRGLMNLLRSYFRVNNLDVKVKSINGGFTSFLRRKWKFKKERNKGYKHHAEDALIIANADFIFKEWKKLDKAKKVMENQMFEEKQAESMPEIETEQEYKEIFITPHQIKHIKDFKDYKYSHRVDKKPNRELINDTLYSTRKDDKGNTLIVNNLNGLYDKDNDKLKKLINKSPEKLLMYHHDPQTYQKLKLIMEQYGDEKNPLYKYYEETGNYLTKYSKKDNGPVIKKIKYYGNKLNAHLDITDDYPNSRNKVVKLSLKPYRFDVYLDNGVYKFVTVKNLDVIKKENYYEVNSKCYEEAKKLKKISNQAEFIASFYNNDLIKINGELYRVIGVNNDLLNRIEVNMIDITYREYLENMNDKRPPRIIKTIASKTQSIKKYSTDILGNLYEVKSKKHPQIIKKG

SEQ ID NO: 7 - DNA, 3159 bp, Staphylococcus aureus
  source 1..3159: mol_type = other DNA
atgaaaaggaactacattctggggctggacatcgggattacaagcgtggggtatgggattattgactatgaaacaagggacgtgatcgacgcaggcgtcagactgttcaaggaggccaacgtggaaaacaatgagggacggagaagcaagaggggagccaggcgcctgaaacgacggagaaggcacagaatccagagggtgaagaaactgctgttcgattacaacctgctgaccgaccattctgagctgagtggaattaatccttatgaagccagggtgaaaggcctgagtcagaagctgtcagaggaagagttttccgcagctctgctgcacctggctaagcgccgaggagtgcataacgtcaatgaggtggaagaggacaccggcaacgagctgtctacaaaggaacagatctcacgcaatagcaaagctctggaagagaagtatgtcgcagagctgcagctggaacggctgaagaaagatggcgaggtgagagggtcaattaataggttcaagacaagcgactacgtcaaagaagccaagcagctgctgaaagtgcagaaggcttaccaccagctggatcagagcttcatcgatacttatatcgacctgctggagactcggagaacctactatgagggaccaggagaagggagccccttcggatggaaagacatcaaggaatggtacgagatgctgatgggacattgcacctattttccagaagagctgagaagcgtcaagtacgcttataacgcagatctgtacaacgccctgaatgacctgaacaacctggtcatcaccagggatgaaaacgagaaactggaatactatgagaagttccagatcatcgaaaacgtgtttaagcagaagaaaaagcctacactgaaacagattgctaaggagatcctggtcaacgaagaggacatcaagggctaccgggtgacaagcactggaaaaccagagttcaccaatctgaaagtgtatcacgatattaaggacatcacagcacggaaagaaatcattgagaacgccgaactgctggatcagattgctaagatcctgactatctaccagagctccgaggacatccaggaagagctgactaacctgaacagcgagctgacccaggaagagatcgaacagattagtaatctgaaggggtacaccggaacacacaacctgtccctgaaagctatcaatctgattctggatgagctgtggcatacaaacgacaatcagattgcaatctttaaccggctgaagctggtcccaaaaaaggtggacctgagtcagcagaaagagatcccaaccacactggtggacgatttcattctgtcacccgtggtcaagcggagcttcatccagagcatcaaagtgatcaacgccatcatcaagaagtacggcctgcccaatgatatcattatcgagctggctagggagaagaacagcaaggacgcacagaagatgatcaatgagatgcagaaacgaaaccggcagaccaatgaacgcattgaagagattatccgaactaccgggaaagagaacgcaaagtacctgattgaaaaaatcaagctgcacgatatgcaggagggaaagtgtctgtattctctggaggccatccccctggaggacctgctgaacaatccattcaactacgaggtcgatcatattatccccagaagcgtgtccttcgacaattcctttaacaacaaggtgctggtcaagcaggaagagaactctaaaaagggcaataggactcctttccagtacctgtctagttcagattccaagatctcttacgaaacctttaaaaagcacattctgaatctggccaaaggaaagggccgcatcagcaagaccaaaaaggagtacctgctggaagagcgggacatcaacagattctccgtccagaaggattttattaaccggaatctggtggacacaagatacgctactcgcggcctgatgaatctgctgcgatcctatttccgggtgaacaatctggatgtgaaagtcaagtccatcaacggcgggttcacatcttttctgaggcgcaaatggaagtttaaaaaggagcgcaacaaagggtacaagcaccatgccgaagatgctctgattatcgcaaatgccgacttcatctttaaggagtggaaaaagctggacaaagccaagaaagtgatggagaaccagatgttcgaagagaagcaggccgaatctatgcccgaaatcgagacagaacaggagtacaaggagattttcatcactcctcaccagatcaagcatatcaaggatttcaaggactacaagtactctcaccgggtggataaaaagcccaacagagagctgatcaatgacaccctgtatagtacaagaaaagacgataaggggaataccctgattgtgaacaatctgaacggactgtacgacaaagataatgacaagctgaaaaagctgatcaacaaaagtcccgagaagctgctgatgtaccaccatgatcctcagacatatcagaaactgaagctgattatggagcagtacggcgacgagaagaacccactgtataagtactatgaagagactgggaactacctgaccaagtatagcaaaaaggataatggccccgtgatcaagaagatcaagtactatgggaacaagctgaatgcccatctggacatcacagacgattaccctaacagtcgcaacaaggtggtcaagctgtcactgaagccatacagattcgatgtctatctggacaacggcgtgtataaatttgtgactgtcaagaatctggatgtcatcaaaaaggagaactactatgaagtgaatagcaagtgctacgaagaggctaaaaagctgaaaaagattagcaaccaggcagagttcatcgcctccttttacaacaacgacctgattaagatcaatggcgaactgtatagggtcatcggggtgaacaatgatctgctgaaccgcattgaagtgaatatgattgacatcacttaccgagagtatctggaaaacatgaatgataagcgcccccctcgaattatcaaaacaattgcctctaagactcagagtatcaaaaagtactcaaccgacattctgggaaacctgtatgaggtgaagagcaaaaagcaccctcagattatcaaaaagggc

SEQ ID NO: 8 - DNA, 3159 bp, Staphylococcus aureus
  source 1..3159: mol_type = other DNA
atgaagcggaactacatcctgggcctggacatcggcatcaccagcgtgggctacggcatcatcgactacgagacacgggacgtgatcgatgccggcgtgcggctgttcaaagaggccaacgtggaaaacaacgagggcaggcggagcaagagaggcgccagaaggctgaagcggcggaggcggcatagaatccagagagtgaagaagctgctgttcgactacaacctgctgaccgaccacagcgagctgagcggcatcaacccctacgaggccagagtgaagggcctgagccagaagctgagcgaggaagagttctctgccgccctgctgcacctggccaagagaagaggcgtgcacaacgtgaacgaggtggaagaggacaccggcaacgagctgtccaccaaagagcagatcagccggaacagcaaggccctggaagagaaatacgtggccgaactgcagctggaacggctgaagaaagacggcgaagtgcggggcagcatcaacagattcaagaccagcgactacgtgaaagaagccaaacagctgctgaaggtgcagaaggcctaccaccagctggaccagagcttcatcgacacctacatcgacctgctggaaacccggcggacctactatgagggacctggcgagggcagccccttcggctggaaggacatcaaagaatggtacgagatgctgatgggccactgcacctacttccccgaggaactgcggagcgtgaagtacgcctacaacgccgacctgtacaacgccctgaacgacctgaacaatctcgtgatcaccagggacgagaacgagaagctggaatattacgagaagttccagatcatcgagaacgtgttcaagcagaagaagaagcccaccctgaagcagatcgccaaagaaatcctcgtgaacgaagaggatattaagggctacagagtgaccagcaccggcaagcccgagttcaccaacctgaaggtgtaccacgacatcaaggacattaccgcccggaaagagattattgagaacgccgagctgctggatcagattgccaagatcctgaccatctaccagagcagcgaggacatccaggaagaactgaccaatctgaactccgagctgacccaggaagagatcgagcagatctctaatctgaagggctataccggcacccacaacctgagcctgaaggccatcaacctgatcctggacgagctgtggcacaccaacgacaaccagatcgctatcttcaaccggctgaagctggtgcccaagaaggtggacctgtcccagcagaaagagatccccaccaccctggtggacgacttcatcctgagccccgtcgtgaagagaagcttcatccagagcatcaaagtgatcaacgccatcatcaagaagtacggcctgcccaacgacatcattatcgagctggcccgcgagaagaactccaaggacgcccagaaaatgatcaacgagatgcagaagcggaaccggcagaccaacgagcggatcgaggaaatcatccggaccaccggcaaagagaacgccaagtacctgatcgagaagatcaagctgcacgacatgcaggaaggcaagtgcctgtacagcctggaagccatccctctggaagatctgctgaacaaccccttcaactatgaggtggaccacatcatccccagaagcgtgtccttcgacaacagcttcaacaacaaggtgctcgtgaagcaggaagaaaacagcaagaagggcaaccggaccccattccagtacctgagcagcagcgacagcaagatcagctacgaaaccttcaagaagcacatcctgaatctggccaagggcaagggcagaatcagcaagaccaagaaagagtatctgctggaagaacgggacatcaacaggttctccgtgcagaaagacttcatcaaccggaacctggtggataccagatacgccaccagaggcctgatgaacctgctgcggagctacttcagagtgaacaacctggacgtgaaagtgaagtccatcaatggcggcttcaccagctttctgcggcggaagtggaagtttaagaaagagcggaacaaggggtacaagcaccacgccgaggacgccctgatcattgccaacgccgatttcatcttcaaagagtggaagaaactggacaaggccaaaaaagtgatggaaaaccagatgttcgaggaaaagcaggccgagagcatgcccgagatcgaaaccgagcaggagtacaaagagatcttcatcaccccccaccagatcaagcacattaaggacttcaaggactacaagtacagccaccgggtggacaagaagcctaatagagagctgattaacgacaccctgtactccacccggaaggacgacaagggcaacaccctgatcgtgaacaatctgaacggcctgtacgacaaggacaatgacaagctgaaaaagctgatcaacaagagccccgaaaagctgctgatgtaccaccacgacccccagacctaccagaaactgaagctgattatggaacagtacggcgacgagaagaatcccctgtacaagtactacgaggaaaccgggaactacctgaccaagtactccaaaaaggacaacggccccgtgatcaagaagattaagtattacggcaacaaactgaacgcccatctggacatcaccgacgactaccccaacagcagaaacaaggtcgtgaagctgtccctgaagccctacagattcgacgtgtacctggacaatggcgtgtacaagttcgtgaccgtgaagaatctggatgtgatcaaaaaagaaaactactacgaagtgaatagcaagtgctatgaggaagctaagaagctgaagaagatcagcaaccaggccgagtttatcgcctccttctacaacaacgatctgatcaagatcaacggcgagctgtatagagtgatcggcgtgaacaacgacctgctgaaccggatcgaagtgaacatgatcgacatcacctaccgcgagtacctggaaaacatgaacgacaagaggccccccaggatcattaagacaatcgcctccaagacccagagcattaagaagtacagcacagacattctgggcaacctgtatgaagtgaaatctaagaagcaccctcagatcatcaaaaagggc

SEQ ID NO: 9 - DNA, 3159 bp, Staphylococcus aureus
  source 1..3159: mol_type = other DNA
atgaagcgcaactacatcctcggactggacatcggcattacctccgtgggatacggcatcatcgattacgaaactagggatgtgatcgacgctggagtcaggctgttcaaagaggcgaacgtggagaacaacgaggggcggcgctcaaagaggggggcccgccggctgaagcgccgccgcagacatagaatccagcgcgtgaagaagctgctgttcgactacaaccttctgaccgaccactccgaactttccggcatcaacccatatgaggctagagtgaagggattgtcccaaaagctgtccgaggaagagttctccgccgcgttgctccacctcgccaagcgcaggggagtgcacaatgtgaacgaagtggaagaagataccggaaacgagctgtccaccaaggagcagatcagccggaactccaaggccctggaagagaaatacgtggcggaactgcaactggagcggctgaagaaagacggagaagtgcgcggctcgatcaaccgcttcaagacctcggactacgtgaaggaggccaagcagctcctgaaagtgcaaaaggcctatcaccaacttgaccagtcctttatcgatacctacatcgatctgctcgagactcggcggacttactacgagggtccaggggagggctccccatttggttggaaggatattaaggagtggtacgaaatgctgatgggacactgcacatacttccctgaggagctgcggagcgtgaaatacgcatacaacgcagacctgtacaacgcgctgaacgacctgaacaatctcgtgatcacccgggacgagaacgaaaagctcgagtattacgaaaagttccagattattgagaacgtgttcaaacagaagaagaagccgacactgaagcagattgccaaggaaatcctcgtgaacgaagaggacatcaagggctatcgagtgacctcaacgggaaagccggagttcaccaatctgaaggtctaccacgacatcaaagacattaccgcccggaaggagatcattgagaacgcggagctgttggaccagattgcgaagattctgaccatctaccaatcctccgaggatattcaggaagaactcaccaacctcaacagcgaactgacccaggaggagatagagcaaatctccaacctgaagggctacaccggaactcataacctgagcctgaaggccatcaacttgatcctggacgagctgtggcacaccaacgataaccagatcgctattttcaatcggctgaagctggtccccaagaaagtggacctctcacaacaaaaggagatccctactacccttgtggacgatttcattctgtcccccgtggtcaagagaagcttcatacagtcaatcaaagtgatcaatgccattatcaagaaatacggtctgcccaacgacattatcattgagctcgcccgcgagaagaactcgaaggacgcccagaagatgattaacgaaatgcagaagaggaaccgacagactaacgaacggatcgaagaaatcatccggaccaccgggaaggaaaacgcgaagtacctgatcgaaaagatcaagctccatgacatgcaggaaggaaagtgtctgtactcgctggaggccattccgctggaggacttgctgaacaacccttttaactacgaagtggatcatatcattccgaggagcgtgtcattcgacaattccttcaacaacaaggtcctcgtgaagcaggaggaaaactcgaagaagggaaaccgcacgccgttccagtacctgagcagcagcgactccaagatttcctacgaaaccttcaagaagcacatcctcaacctggcaaaggggaagggtcgcatctccaagaccaagaaggaatatctgctggaagaaagagacatcaacagattctccgtgcaaaaggacttcatcaaccgcaacctcgtggatactagatacgctactcggggtctgatgaacctcctgagaagctactttagagtgaacaatctggacgtgaaggtcaagtcgattaacggaggtttcacctccttcctgcggcgcaagtggaagttcaagaaggaacggaacaagggctacaagcaccacgccgaggacgccctgatcattgccaacgccgacttcatcttcaaagaatggaagaaacttgacaaggctaagaaggtcatggaaaaccagatgttcgaagaaaagcaggccgagtctatgcctgaaatcgagactgaacaggagtacaaggaaatctttattacgccacaccagatcaaacacatcaaggatttcaaggattacaagtactcacatcgcgtggacaaaaagccgaacagggaactgatcaacgacaccctctactccacccggaaggatgacaaagggaataccctcatcgtcaacaaccttaacggcctgtacgacaaggacaacgataagctgaagaagctcattaacaagtcgcccgaaaagttgctgatgtaccaccacgaccctcagacttaccagaagctcaagctgatcatggagcagtatggggacgagaaaaacccgttgtacaagtactacgaagaaactgggaattatctgactaagtactccaagaaagataacggccccgtgattaagaagattaagtactacggcaacaagctgaacgcccatctggacatcaccgatgactaccctaattcccgcaacaaggtcgtcaagctgagcctcaagccctaccggtttgatgtgtaccttgacaatggagtgtacaagttcgtgactgtgaagaaccttgacgtgatcaagaaggagaactactacgaagtcaactccaagtgctacgaggaagcaaagaagttgaagaagatctcgaaccaggccgagttcattgcctccttctataacaacgacctgattaagatcaacggcgaactgtaccgcgtcattggcgtgaacaacgatctcctgaaccgcatcgaagtgaacatgatcgacatcacttaccgggaatacctggagaatatgaacgacaagcgcccgccccggatcattaagactatcgcctcaaagacccagtcgatcaagaagtacagcaccgacatcctgggcaacctgtacgaggtcaaatcgaagaagcacccccagatcatcaagaaggga

SEQ ID NO: 10 - DNA, 3159 bp, Staphylococcus aureus
  source 1..3159: mol_type = other DNA
atgaaaaggaactacattctggggctggccatcgggattacaagcgtggggtatgggattattgactatgaaacaagggacgtgatcgacgcaggcgtcagactgttcaaggaggccaacgtggaaaacaatgagggacggagaagcaagaggggagccaggcgcctgaaacgacggagaaggcacagaatccagagggtgaagaaactgctgttcgattacaacctgctgaccgaccattctgagctgagtggaattaatccttatgaagccagggtgaaaggcctgagtcagaagctgtcagaggaagagttttccgcagctctgctgcacctggctaagcgccgaggagtgcataacgtcaatgaggtggaagaggacaccggcaacgagctgtctacaaaggaacagatctcacgcaatagcaaagctctggaagagaagtatgtcgcagagctgcagctggaacggctgaagaaagatggcgaggtgagagggtcaattaataggttcaagacaagcgactacgtcaaagaagccaagcagctgctgaaagtgcagaaggcttaccaccagctggatcagagcttcatcgatacttatatcgacctgctggagactcggagaacctactatgagggaccaggagaagggagccccttcggatggaaagacatcaaggaatggtacgagatgctgatgggacattgcacctattttccagaagagctgagaagcgtcaagtacgcttataacgcagatctgtacaacgccctgaatgacctgaacaacctggtcatcaccagggatgaaaacgagaaactggaatactatgagaagttccagatcatcgaaaacgtgtttaagcagaagaaaaagcctacactgaaacagattgctaaggagatcctggtcaacgaagaggacatcaagggctaccgggtgacaagcactggaaaaccagagttcaccaatctgaaagtgtatcacgatattaaggacatcacagcacggaaagaaatcattgagaacgccgaactgctggatcagattgctaagatcctgactatctaccagagctccgaggacatccaggaagagctgactaacctgaacagcgagctgacccaggaagagatcgaacagattagtaatctgaaggggtacaccggaacacacaacctgtccctgaaagctatcaatctgattctggatgagctgtggcatacaaacgacaatcagattgcaatctttaaccggctgaagctggtcccaaaaaaggtggacctgagtcagcagaaagagatcccaaccacactggtggacgatttcattctgtcacccgtggtcaagcggagcttcatccagagcatcaaagtgatcaacgccatcatcaagaagtacggcctgcccaatgatatcattatcgagctggctagggagaagaacagcaaggacgcacagaagatgatcaatgagatgcagaaacgaaaccggcagaccaatgaacgcattgaagagattatccgaactaccgggaaagagaacgcaaagtacctgattgaaaaaatcaagctgcacgatatgcaggagggaaagtgtctgtattctctggaggccatccccctggaggacctgctgaacaatccattcaactacgaggtcgatcatattatccccagaagcgtgtccttcgacaattcctttaacaacaaggtgctggtcaagcaggaagagaactctaaaaagggcaataggactcctttccagtacctgtctagttcagattccaagatctcttacgaaacctttaaaaagcacattctgaatctggccaaaggaaagggccgcatcagcaagaccaaaaaggagtacctgctggaagagcgggacatcaacagattctccgtccagaaggattttattaaccggaatctggtggacacaagatacgctactcgcggcctgatgaatctgctgcgatcctatttccgggtgaacaatctggatgtgaaagtcaagtccatcaacggcgggttcacatcttttctgaggcgcaaatggaagtttaaaaaggagcgcaacaaagggtacaagcaccatgccgaagatgctctgattatcgcaaatgccgacttcatctttaaggagtggaaaaagctggacaaagccaagaaagtgatggagaaccagatgttcgaagagaagcaggccgaatctatgcccgaaatcgagacagaacaggagtacaaggagattttcatcactcctcaccagatcaagcatatcaaggatttcaaggactacaagtactctcaccgggtggataaaaagcccaacagagagctgatcaatgacaccctgtatagtacaagaaaagacgataaggggaataccctgattgtgaacaatctgaacggactgtacgacaaagataatgacaagctgaaaaagctgatcaacaaaagtcccgagaagctgctgatgtaccaccatgatcctcagacatatcagaaactgaagctgattatggagcagtacggcgacgagaagaacccactgtataagtactatgaagagactgggaactacctgaccaagtatagcaaaaaggataatggccccgtgatcaagaagatcaagtactatgggaacaagctgaatgcccatctggacatcacagacgattaccctaacagtcgcaacaaggtggtcaagctgtcactgaagccatacagattcgatgtctatctggacaacggcgtgtataaatttgtgactgtcaagaatctggatgtcatcaaaaaggagaactactatgaagtgaatagcaagtgctacgaagaggctaaaaagctgaaaaagattagcaaccaggcagagttcatcgcctccttttacaacaacgacctgattaagatcaatggcgaactgtatagggtcatcggggtgaacaatgatctgctgaaccgcattgaagtgaatatgattgacatcacttaccgagagtatctggaaaacatgaatgataagcgcccccctcgaattatcaaaacaattgcctctaagactcagagtatcaaaaagtactcaaccgacattctgggaaacctgtatgaggtgaagagcaaaaagcaccctcagattatcaaaaagggc

SEQ ID NO: 11 - DNA, 3159 bp, Staphylococcus aureus
  source 1..3159: mol_type = other DNA
atgaaaaggaactacattctggggctggacatcgggattacaagcgtggggtatgggattattgactatgaaacaagggacgtgatcgacgcaggcgtcagactgttcaaggaggccaacgtggaaaacaatgagggacggagaagcaagaggggagccaggcgcctgaaacgacggagaaggcacagaatccagagggtgaagaaactgctgttcgattacaacctgctgaccgaccattctgagctgagtggaattaatccttatgaagccagggtgaaaggcctgagtcagaagctgtcagaggaagagttttccgcagctctgctgcacctggctaagcgccgaggagtgcataacgtcaatgaggtggaagaggacaccggcaacgagctgtctacaaaggaacagatctcacgcaatagcaaagctctggaagagaagtatgtcgcagagctgcagctggaacggctgaagaaagatggcgaggtgagagggtcaattaataggttcaagacaagcgactacgtcaaagaagccaagcagctgctgaaagtgcagaaggcttaccaccagctggatcagagcttcatcgatacttatatcgacctgctggagactcggagaacctactatgagggaccaggagaagggagccccttcggatggaaagacatcaaggaatggtacgagatgctgatgggacattgcacctattttccagaagagctgagaagcgtcaagtacgcttataacgcagatctgtacaacgccctgaatgacctgaacaacctggtcatcaccagggatgaaaacgagaaactggaatactatgagaagttccagatcatcgaaaacgtgtttaagcagaagaaaaagcctacactgaaacagattgctaaggagatcctggtcaacgaagaggacatcaagggctaccgggtgacaagcactggaaaaccagagttcaccaatctgaaagtgtatcacgatattaaggacatcacagcacggaaagaaatcattgagaacgccgaactgctggatcagattgctaagatcctgactatctaccagagctccgaggacatccaggaagagctgactaacctgaacagcgagctgacccaggaagagatcgaacagattagtaatctgaaggggtacaccggaacacacaacctgtccctgaaagctatcaatctgattctggatgagctgtggcatacaaacgacaatcagattgcaatctttaaccggctgaagctggtcccaaaaaaggtggacctgagtcagcagaaagagatcccaaccacactggtggacgatttcattctgtcacccgtggtcaagcggagcttcatccagagcatcaaagtgatcaacgccatcatcaagaagtacggcctgcccaatgatatcattatcgagctggctagggagaagaacagcaaggacgcacagaagatgatcaatgagatgcagaaacgaaaccggcagaccaatgaacgcattgaagagattatccgaactaccgggaaagagaacgcaaagtacctgattgaaaaaatcaagctgcacgatatgcaggagggaaagtgtctgtattctctggaggccatccccctggaggacctgctgaacaatccattcaactacgaggtcgatcatattatccccagaagcgtgtccttcgacaattcctttaacaacaaggtgctggtcaagcaggaagaggcctctaaaaagggcaataggactcctttccagtacctgtctagttcagattccaagatctcttacgaaacctttaaaaagcacattctgaatctggccaaaggaaagggccgcatcagcaagaccaaaaaggagtacctgctggaagagcgggacatcaacagattctccgtccagaaggattttattaaccggaatctggtggacacaagatacgctactcgcggcctgatgaatctgctgcgatcctatttccgggtgaacaatctggatgtgaaagtcaagtccatcaacggcgggttcacatcttttctgaggcgcaaatggaagtttaaaaaggagcgcaacaaagggtacaagcaccatgccgaagatgctctgattatcgcaaatgccgacttcatctttaaggagtggaaaaagctggacaaagccaagaaagtgatggagaaccagatgttcgaagagaagcaggccgaatctatgcccgaaatcgagacagaacaggagtacaaggagattttcatcactcctcaccagatcaagcatatcaaggatttcaaggactacaagtactctcaccgggtggataaaaagcccaacagagagctgatcaatgacaccctgtatagtacaagaaaagacgataaggggaataccctgattgtgaacaatctgaacggactgtacgacaaagataatgacaagctgaaaaagctgatcaacaaaagtcccgagaagctgctgatgtaccaccatgatcctcagacatatcagaaactgaagctgattatggagcagtacggcgacgagaagaacccactgtataagtactatgaagagactgggaactacctgaccaagtatagcaaaaaggataatggccccgtgatcaagaagatcaagtactatgggaacaagctgaatgcccatctggacatcacagacgattaccctaacagtcgcaacaaggtggtcaagctgtcactgaagccatacagattcgatgtctatctggacaacggcgtgtataaatttgtgactgtcaagaatctggatgtcatcaaaaaggagaactactatgaagtgaatagcaagtgctacgaagaggctaaaaagctgaaaaagattagcaaccaggcagagttcatcgcctccttttacaacaacgacctgattaagatcaatggcgaactgtatagggtcatcggggtgaacaatgatctgctgaaccgcattgaagtgaatatgattgacatcacttaccgagagtatctggaaaacatgaatgataagcgcccccctcgaattatcaaaacaattgcctctaagactcagagtatcaaaaagtactcaaccgacattctgggaaacctgtatgaggtgaagagcaaaaagcaccctcagattatcaaaaagggc

SEQ ID NO: 12 - protein, 1082 aa, Neisseria meningitidis
MAAFKPNPINYILGLDIGIASVGWAMVEIDEDENPICLIDLGVRVFERAEVPKTGDSLAMARRLARSVRRLTRRRAHRLLRARRLLKREGVLQAADFDENGLIKSLPNTPWQLRAAALDRKLTPLEWSAVLLHLIKHRGYLSQRKNEGETADKELGALLKGVADNAHALQTGDFRTPAELALNKFEKESGHIRNQRGDYSHTFSRKDLQAELILLFEKQKEFGNPHVSGGLKEGIETLLMTQRPALSGDAVQKMLGHCTFEPAEPKAAKNTYTAERFIWLTKLNNLRILEQGSERPLTDTERATLMDEPYRKSKLTYAQARKLLGLEDTAFFKGLRYGKDNAEASTLMEMKAYHAISRALEKEGLKDKKSPLNLSPELQDEIGTAFSLFKTDEDITGRLKDRIQPEILEALLKHISFDKFVQISLKALRRIVPLMEQGKRYDEACAEIYGDHYGKKNTEEKIYLPPIPADEIRNPVVLRALSQARKVINGVVRRYGSPARIHIETAREVGKSFKDRKEIEKRQEENRKDREKAAAKFREYFPNFVGEPKSKDILKLRLYEQQHGKCLYSGKEINLGRLNEKGYVEIDHALPFSRTWDDSFNNKVLVLGSENQNKGNQTPYEYFNGKDNSREWQEFKARVETSRFPRSKKQRILLQKFDEDGFKERNLNDTRYVNRFLCQFVADRMRLTGKGKKRVFASNGQITNLLRGFWGLRKVRAENDRHHALDAVVVACSTVAMQQKITRFVRYKEMNAFDGKTIDKETGEVLHQKTHFPQPWEFFAQEVMIRVFGKPDGKPEFEEADTPEKLRTLLAEKLSSRPEAVHEYVTPLFVSRAPNRKMSGQGHMETVKSAKRLDEGVSVLRVPLTQLKLKDLEKMVNREREPKLYEALKARLEAHKDDPAKAFAEPFYKYDKAGNRTQQVKAVRVEQVQKTGVWVRNHNGIADNATMVRVDVFEKGDKYYLVPIYSWQVAKGILPDRAVVQGKDEEDWQLIDDSFNFKFSLHPNDLVEVITKKARMFGYFASCHRGTGNINIRIHDLDHKIGKNGILEGIGVKTALSFQKYQIDELGKEIRPCRLKKRPPVR

SEQ ID NO: 13 - DNA, 3249 bp, Neisseria meningitidis
  misc_feature 1..3249: note = Exemplary codon optimized Cas9
  source 1..3249: mol_type = other DNA
atggccgccttcaagcccaaccccatcaactacatcctgggcctggacatcggcatcgccagcgtgggctgggccatggtggagatcgacgaggacgagaaccccatctgcctgatcgacctgggtgtgcgcgtgttcgagcgcgctgaggtgcccaagactggtgacagtctggctatggctcgccggcttgctcgctctgttcggcgccttactcgccggcgcgctcaccgccttctgcgcgctcgccgcctgctgaagcgcgagggtgtgctgcaggctgccgacttcgacgagaacggcctgatcaagagcctgcccaacactccttggcagctgcgcgctgccgctctggaccgcaagctgactcctctggagtggagcgccgtgctgctgcacctgatcaagcaccgcggctacctgagccagcgcaagaacgagggcgagaccgccgacaaggagctgggtgctctgctgaagggcgtggccgacaacgcccacgccctgcagactggtgacttccgcactcctgctgagctggccctgaacaagttcgagaaggagagcggccacatccgcaaccagcgcggcgactacagccacaccttcagccgcaaggacctgcaggccgagctgatcctgctgttcgagaagcagaaggagttcggcaacccccacgtgagcggcggcctgaaggagggcatcgagaccctgctgatgacccagcgccccgccctgagcggcgacgccgtgcagaagatgctgggccactgcaccttcgagccagccgagcccaaggccgccaagaacacctacaccgccgagcgcttcatctggctgaccaagctgaacaacctgcgcatcctggagcagggcagcgagcgccccctgaccgacaccgagcgcgccaccctgatggacgagccctaccgcaagagcaagctgacctacgcccaggcccgcaagctgctgggtctggaggacaccgccttcttcaagggcctgcgctacggcaaggacaacgccgaggccagcaccctgatggagatgaaggcctaccacgccatcagccgcgccctggagaaggagggcctgaaggacaagaagagtcctctgaacctgagccccgagctgcaggacgagatcggcaccgccttcagcctgttcaagaccgacgaggacatcaccggccgcctgaaggaccgcatccagcccgagatcctggaggccctgctgaagcacatcagcttcgacaagttcgtgcagatcagcctgaaggccctgcgccgcatcgtgcccctgatggagcagggcaagcgctacgacgaggcctgcgccgagatctacggcgaccactacggcaagaagaacaccgaggagaagatctacctgcctcctatccccgccgacgagatccgcaaccccgtggtgctgcgcgccctgagccaggcccgcaaggtgatcaacggcgtggtgcgccgctacggcagccccgcccgcatccacatcgagaccgcccgcgaggtgggcaagagcttcaaggaccgcaaggagatcgagaagcgccaggaggagaaccgcaaggaccgcgagaaggccgccgccaagttccgcgagtacttccccaacttcgtgggcgagcccaagagcaaggacatcctgaagctgcgcctgtacgagcagcagcacggcaagtgcctgtacagcggcaaggagatcaacctgggccgcctgaacgagaagggctacgtggagatcgaccacgccctgcccttcagccgcacctgggacgacagcttcaacaacaaggtgctggtgctgggcagcgagaaccagaacaagggcaaccagaccccctacgagtacttcaacggcaaggacaacagccgcgagtggcaggagttcaaggcccgcgtggagaccagccgcttcccccgcagcaagaagcagcgcatcctgctgcagaagttcgacgaggacggcttcaaggagcgcaacctgaacgacacccgctacgtgaaccgcttcctgtgccagttcgtggccgaccgcatgcgcctgaccggcaagggcaagaagcgcgtgttcgccagcaacggccagatcaccaacctgctgcgcggcttctggggcctgcgcaaggtgcgcgccgagaacgaccgccaccacgccctggacgccgtggtggtggcctgcagcaccgtggccatgcagcagaagatcacccgcttcgtgcgctacaaggagatgaacgccttcgacggtaaaaccatcgacaaggagaccggcgaggtgctgcaccagaagacccacttcccccagccctgggagttcttcgcccaggaggtgatgatccgcgtgttcggcaagcccgacggcaagcccgagttcgaggaggccgacacccccgagaagctgcgcaccctgctggccgagaagctgagcagccgccctgaggccgtgcacgagtacgtgactcctctgttcgtgagccgcgcccccaaccgcaagatgagcggtcagggtcacatggagaccgtgaagagcgccaagcgcctggacgagggcgtgagcgtgctgcgcgtgcccctgacccagctgaagctgaaggacctggagaagatggtgaaccgcgagcgcgagcccaagctgtacgaggccctgaaggcccgcctggaggcccacaaggacgaccccgccaaggccttcgccgagcccttctacaagtacgacaaggccggcaaccgcacccagcaggtgaaggccgtgcgcgtggagcaggtgcagaagaccggcgtgtgggtgcgcaaccacaacggcatcgccgacaacgccaccatggtgcgcgtggacgtgttcgagaagggcgacaagtactacctggtgcccatctacagctggcaggtggccaagggcatcctgcccgaccgcgccgtggtgcagggcaaggacgaggaggactggcagctgatcgacgacagcttcaacttcaagttcagcctgcaccccaacgacctggtggaggtgatcaccaagaaggcccgcatgttcggctacttcgccagctgccaccgcggcaccggcaacatcaacatccgcatccacgacctggaccacaagatcggcaagaacggcatcctggagggcatcggcgtgaagaccgccctgagcttccagaagtaccagatcgacgagctgggcaaggagatccgcccctgccgcctgaagaagcgccctcctgtgcgctaa

SEQ ID NO: 14 - protein, 859 aa, synthetic construct
  REGION 1..859: note = Synthetic Cas9 consensus sequence derived from Sm, Sp, St, and Li Cas9 sequences
  SITE 4: note = misc_feature - Xaa can be any naturally occurring amino acid
  REGION 8..18: note = misc_feature - N-terminal RuvC-like domain
  SITE 21: note = misc_feature - Xaa can be any naturally occurring amino acid
  SITE 23: note = misc_feature - Xaa can be any naturally occurring amino acid
  SITE 24: note = misc_feature - Xaa can be any naturally occurring amino acid
  SITE 26: note = misc_feature - Xaa can be any naturally occurring amino acid
  REGION 29..31: note = misc_feature - Each Xaa can independently be any naturally occurring amino acid
  SITE 33: note = misc_feature - Xaa can be any naturally occurring amino acid
  SITE 36: note = misc_feature - Xaa can be any naturally occurring amino acid
  SITE 45: note = misc_feature - Xaa can be any naturally occurring amino acid
  SITE 54: note = misc_feature - Xaa can be any naturally occurring amino acid
  SITE 63: note = misc_feature - Xaa can be any naturally occurring amino acid
  SITE 71: note = misc_feature - Xaa can be any naturally occurring amino acid
  SITE 75: note = misc_feature - Xaa can be any naturally occurring amino acid
  SITE 76: note = misc_feature - Xaa can be any naturally occurring amino acid
  REGION 78..80: note = misc_feature - Each Xaa can independently be any naturally occurring amino acid
  SITE 82: note = misc_feature - Xaa can be any naturally occurring amino acid
  SITE 84: note = misc_feature - Xaa can be any naturally occurring amino acid
  SITE 85: note = misc_feature - Xaa can be any naturally occurring amino acid
  SITE 89: note = misc_feature - Xaa can be any naturally occurring amino acid
  SITE 90: note = misc_feature - Xaa can be any naturally occurring amino acid
  SITE 98: note = misc_feature - Xaa can be any naturally occurring amino acid
  SITE 100: note = misc_feature - Xaa can be any naturally occurring amino acid
  SITE 106: note = misc_feature - Xaa can be any naturally occurring amino acid
  SITE 113: note = misc_feature - Xaa can be any naturally occurring amino acid
  SITE 116: note = misc_feature - Xaa can be any naturally occurring amino acid
  SITE 125: note = misc_feature - Xaa can be any naturally occurring amino acid
  SITE 126: note = misc_feature - Xaa can be any naturally occurring amino acid
  REGION 128..133: note = misc_feature - Each Xaa can independently be any naturally occurring amino acid
  SITE 135: note = misc_feature - Xaa can be any naturally occurring amino acid
  SITE 137: note = misc_feature - Xaa can be any naturally occurring amino acid
  REGION 139..147: note = misc_feature - Each Xaa can independently be any naturally occurring amino acid
  REGION 153..155: note = misc_feature - Each Xaa can independently be any naturally occurring amino acid
  SITE 157: note = misc_feature - Xaa can be any naturally occurring amino acid
  SITE 159: note = misc_feature - Xaa can be any naturally occurring amino acid
  SITE 161: note = misc_feature - Xaa can be any naturally occurring amino acid
  SITE 163: note = misc_feature - Xaa can be any naturally occurring amino acid
  REGION 166..168: note = misc_feature - Each Xaa can independently be any naturally occurring amino acid
  SITE 170: note = misc_feature - Xaa can be any naturally occurring amino acid
  SITE 171: note = misc_feature - Xaa can be any naturally occurring amino acid
  REGION 173..175: note = misc_feature - Each Xaa can independently be any naturally occurring amino acid
  SITE 177: note = misc_feature - Xaa can be any naturally occurring amino acid
  SITE 183: note = misc_feature - Xaa can be any naturally occurring amino acid
  REGION 185..187: note = misc_feature - Each Xaa can independently be any naturally occurring amino acid
  SITE 189: note = misc_feature - Xaa can be any naturally occurring amino acid
  REGION 192..195: note = misc_feature - Each Xaa can independently be any naturally occurring amino acid
  SITE 198: note = misc_feature - Xaa can be any naturally occurring amino acid
  SITE 199: note = misc_feature - Xaa can be any naturally occurring amino acid
  SITE 202: note = misc_feature - Xaa can be any naturally occurring amino acid
  SITE 206: note = misc_feature - Xaa can be any naturally occurring amino acid
  SITE 207: note = misc_feature - Xaa can be any naturally occurring amino acid
  SITE 210: note = misc_feature - Xaa can be any naturally occurring amino acid
  SITE 212: note = misc_feature - Xaa can be any naturally occurring amino acid
  SITE 213: note = misc_feature - Xaa can be any naturally occurring amino acid
  SITE 219: note = misc_feature - Xaa can be any naturally occurring amino acid
  SITE 220: note = misc_feature - Xaa can be any naturally occurring amino acid
  SITE 222: note = misc_feature - Xaa can be any naturally occurring amino acid
  SITE 224: note = misc_feature - Xaa can be any naturally occurring amino acid
  SITE 226: note = misc_feature - Xaa can be any naturally occurring amino acid
  SITE 236: note = misc_feature - Xaa can be any naturally occurring amino acid
  SITE 240: note = misc_feature - Xaa can be any naturally occurring amino acid
  SITE 241: note = misc_feature - Xaa can be any naturally occurring amino acid
  REGION 244..246: note = misc_feature - Each Xaa can independently be any naturally occurring amino acid
  SITE 248: note = misc_feature - Xaa can be any naturally occurring amino acid
  SITE 249: note = misc_feature - Xaa can be any naturally occurring amino acid
  SITE 250: note = misc_feature - Xaa can be any naturally occurring amino acid
  REGION 252..254: note = misc_feature - Each Xaa can independently be any naturally occurring amino acid
  SITE 256: note = misc_feature - Xaa can be any naturally occurring amino acid
  SITE 257: note = misc_feature - Xaa can be any naturally occurring amino acid
  SITE 268: note = misc_feature - Xaa can be any naturally occurring amino acid
  SITE 271: note = misc_feature - Xaa can be any naturally occurring amino acid
  SITE 273: note = misc_feature - Xaa can be any naturally occurring amino acid
  SITE 277: note = misc_feature - Xaa can be any naturally occurring amino acid
  SITE 280: note = misc_feature - Xaa can be any naturally occurring amino acid
  SITE 281: note = misc_feature - Xaa can be any naturally occurring amino acid
  SITE 283: note = misc_feature - Xaa can be any naturally occurring amino acid
  SITE 289: note = misc_feature - Xaa can be any naturally occurring amino acid
  SITE 290: note = misc_feature - Xaa can be any naturally occurring amino acid
  REGION 292..294: note = misc_feature - Each Xaa can independently be any naturally occurring amino acid
  SITE 301: note = misc_feature - Xaa can be any naturally occurring amino acid
  SITE 308: note = misc_feature - Xaa can be any naturally occurring amino acid
  REGION 319..322: note = misc_feature - Each Xaa can independently be any naturally occurring amino acid
  SITE 328: note = misc_feature - Xaa can be any naturally occurring amino acid
  SITE 329: note = misc_feature - Xaa can be any naturally occurring amino acid
  REGION 335..337: note = misc_feature - Each Xaa can independently be any naturally occurring amino acid
  SITE 346: note = misc_feature - Xaa can be any naturally occurring amino acid
  SITE 347: note = misc_feature - Xaa can be any naturally occurring amino acid
  REGION 356..361: note = misc_feature - Each Xaa can independently be any naturally occurring amino acid
  SITE 363: note = misc_feature - Xaa can be any naturally occurring amino acid
  REGION 370..373: note = misc_feature - Each Xaa can independently be any naturally occurring amino acid
  SITE 375: note = misc_feature - Xaa can be any naturally occurring amino acid
  SITE 376: note = misc_feature - Xaa can be any naturally occurring amino acid
  SITE 379: note = misc_feature - Xaa can be any naturally occurring amino acid
  REGION 386..390: note = misc_feature - Each Xaa can independently be any naturally occurring amino acid
  SITE 393: note = misc_feature - Xaa can be any naturally occurring amino acid
  SITE 395: note = misc_feature - Xaa can be any naturally occurring amino acid
  SITE 396: note = misc_feature - Xaa can be any naturally occurring amino acid
  SITE 398: note = misc_feature - Xaa can be any naturally occurring amino acid
  SITE 400: note = misc_feature - Xaa can be any naturally occurring amino acid
  SITE 403: note = misc_feature - Xaa can be any naturally occurring amino acid
  SITE 407: note = misc_feature - Xaa can be any naturally occurring amino acid
  SITE 410: note = misc_feature - Xaa can be any naturally occurring amino acid
  SITE 411: note = misc_feature - Xaa can be any naturally occurring amino acid
  REGION 413..416: note = misc_feature - Each Xaa can independently be any naturally occurring amino acid
  SITE 418: note = misc_feature - Xaa can be any naturally occurring amino acid
  SITE 422: note = misc_feature - Xaa can be any naturally occurring amino acid
  SITE 428: note = misc_feature - Xaa can be any naturally occurring amino acid
  SITE 431: note = misc_feature - Xaa can be any naturally occurring amino acid
  SITE 433: note = misc_feature - Xaa can be any naturally occurring amino acid
  REGION 437..439: note = misc_feature - Each Xaa can independently be any naturally occurring amino acid
  SITE 445: note = misc_feature - Xaa can be any naturally occurring amino acid
  SITE 451: note = misc_feature - Xaa can be any naturally occurring amino acid
  SITE 456: note = misc_feature - Xaa can be any naturally occurring amino acid
  SITE 459: note = misc_feature - Xaa can be any naturally occurring amino acid
  REGION 465..469: note = misc_feature - Each Xaa can independently be any naturally occurring amino acid
  SITE 481: note = misc_feature - Xaa can be any naturally occurring amino acid
  SITE 482: note = misc_feature - Xaa can be any naturally occurring amino acid
  SITE 484: note = misc_feature - Xaa can be any naturally occurring amino acid
  SITE 490: note = misc_feature - Xaa can be any naturally occurring amino acid
  SITE 494: note = misc_feature - Xaa can be any naturally occurring amino acid
  REGION 495..502: note = misc_feature - RuvC-like domain
  SITE 497: note = misc_feature - Xaa can be any naturally occurring amino acid
  SITE 506: note = misc_feature - Xaa can be any naturally occurring amino acid
  SITE 510: note = misc_feature - Xaa can be any naturally occurring amino acid
  SITE 513: note = misc_feature - Xaa can be any naturally occurring amino acid
  SITE 514: note = misc_feature - Xaa can be any naturally occurring amino acid
  SITE 517: note = misc_feature - Xaa can be any naturally occurring amino acid
  SITE 520: note = misc_feature - Xaa can be any naturally occurring amino acid
  SITE 525: note = misc_feature - Xaa can be any naturally occurring amino acid
  SITE 526: note = misc_feature - Xaa can be any naturally occurring amino acid
  SITE 529: note = misc_feature - Xaa can be any naturally occurring amino acid
  SITE 531: note = misc_feature - Xaa can be any naturally occurring amino acid
  SITE 532: note = misc_feature - Xaa can be any naturally occurring amino acid
  SITE 534: note = misc_feature - Xaa can be any naturally occurring amino acid
  SITE 542: note = misc_feature - Xaa can be any naturally occurring amino acid
  SITE 546: note = misc_feature - Xaa can be any naturally occurring amino acid
  SITE 547: note = misc_feature - Xaa can be any naturally occurring amino acid
  SITE 553: note = misc_feature - Xaa can be any naturally occurring amino acid
  REGION 555..575: note = misc_feature - HNH-like domain
  SITE 556: note = misc_feature - Xaa can be any naturally occurring amino acid
  SITE 560: note = misc_feature - Xaa can be any naturally occurring amino acid
  SITE 563: note = misc_feature - Xaa can be any naturally occurring amino acid
  SITE 565: note = misc_feature - Xaa can be any naturally occurring amino acid
  SITE 567: note = misc_feature - Xaa can be any naturally occurring amino acid
  SITE 579: note = misc_feature - Xaa can be any naturally occurring amino acid
  SITE 582: note = misc_feature - Xaa can be any naturally occurring amino acid
  SITE 583: note = misc_feature - Xaa can be any naturally occurring amino acid
  SITE 585: note = misc_feature - Xaa can be any naturally occurring amino acid
  SITE 588: note = misc_feature - Xaa can be any naturally occurring amino acid
  SITE 590: note = misc_feature - Xaa can be any naturally occurring amino acid
  SITE 592: note = misc_feature - Xaa can be any naturally occurring amino acid
  REGION 594..596: note = misc_feature - Each Xaa can independently be any naturally occurring amino acid
  SITE 610: note = misc_feature - Xaa can be any naturally occurring amino acid
  SITE 616: note = misc_feature - Xaa can be any naturally occurring amino acid
  SITE 628: note = misc_feature - Xaa can be any naturally occurring amino acid
  SITE 631: note = misc_feature - Xaa can be any naturally occurring amino acid
  SITE 633: note = misc_feature - Xaa can be any naturally occurring amino acid
  SITE 634: note = misc_feature - Xaa can be any naturally occurring amino acid
  SITE 636: note = misc_feature - Xaa can be any naturally occurring amino acid
  REGION 638..641: note = misc_feature - Each Xaa can independently be any naturally occurring amino acid
  REGION 643..645: note = misc_feature - Each Xaa can independently be any naturally occurring amino acid
  SITE 653: note = misc_feature - Xaa can be any naturally occurring amino acid
  SITE 657: note = misc_feature - Xaa can be any naturally occurring amino acid
  SITE 659: note = misc_feature - Xaa can be any naturally occurring amino acid
  SITE 660: note = misc_feature - Xaa can be any naturally occurring amino acid
  SITE 665: note = misc_feature - Xaa can be any naturally occurring amino acid
  SITE 666: note = misc_feature - Xaa can be any naturally occurring amino acid
  SITE 668: note = misc_feature - Xaa can be any naturally occurring amino acid
  SITE 669: note = misc_feature - Xaa can be any naturally occurring amino acid
  REGION 670..677: note = misc_feature - RuvC-like domain
  SITE 680: note = misc_feature - Xaa can be any naturally occurring amino acid
  SITE 681: note = misc_feature - Xaa can be any naturally occurring amino acid
  SITE 683: note = misc_feature - Xaa can be any naturally occurring amino acid
  SITE 686: note = misc_feature - Xaa can be any naturally occurring amino acid
  SITE 696: note = misc_feature - Xaa can be any naturally occurring amino acid
  SITE 697: note = misc_feature - Xaa can be any naturally occurring amino acid
  SITE 704: note = misc_feature - Xaa can be any naturally occurring amino acid
  SITE 708: note = misc_feature - Xaa can be any naturally occurring amino acid
  SITE 710: note = misc_feature - Xaa can be any naturally occurring amino acid
  SITE 711: note = misc_feature - Xaa can be any naturally occurring amino acid
  SITE 714: note = misc_feature - Xaa can be any naturally occurring amino acid
  REGION 717..720: note = misc_feature - Each Xaa can independently be any naturally occurring amino acid
  SITE 722: note = misc_feature - Xaa can be any naturally occurring amino acid
  SITE 725: note = misc_feature - Xaa can be any naturally occurring amino acid
  SITE 727: note = misc_feature - Xaa can be any naturally occurring amino acid
  REGION 733..735: note = misc_feature - Each Xaa can independently be any naturally occurring amino acid
  SITE 740: note = misc_feature - Xaa can be any naturally occurring amino acid
  SITE 742: note = misc_feature - Xaa can be any naturally occurring amino acid
  REGION 749..754: note = misc_feature - Each Xaa can independently be any naturally occurring amino acid
  REGION 758..761: note = misc_feature - Each Xaa can independently be any naturally occurring amino acid
  REGION 763..768: note = misc_feature - Each Xaa can independently be any naturally occurring amino acid
  SITE 771: note = misc_feature - Xaa can be any naturally occurring amino acid
  REGION 774..777: note = misc_feature - Each Xaa can independently be any naturally occurring amino acid
  SITE 782: note = misc_feature - Xaa can be any naturally occurring amino acid
  REGION 784..786: note = misc_feature - Each Xaa can independently be any naturally occurring amino acid
  SITE 788: note = misc_feature - Xaa can be any naturally occurring amino acid
  SITE 790: note = misc_feature - Xaa can be any naturally occurring amino acid
  SITE 795: note = misc_feature - Xaa can be any naturally occurring amino acid
  SITE 799: note = misc_feature - Xaa can be any naturally occurring amino acid
  SITE 801: note = misc_feature - Xaa can be any naturally occurring amino acid
  SITE 802: note = misc_feature - Xaa can be any naturally occurring amino acid
  SITE 804: note = misc_feature - Xaa can be any naturally occurring amino acid
  REGION 806..813: note = misc_feature - Each Xaa can independently be any naturally occurring amino acid
  REGION 815..818: note = misc_feature - Each Xaa can independently be any naturally occurring amino acid
  SITE 820: note = misc_feature - Xaa can be any naturally occurring amino acid
  REGION 823..827: note = misc_feature - Each Xaa can independently be any naturally occurring amino acid
  SITE 829: note = misc_feature - Xaa can be any naturally occurring amino acid
  SITE 830: note = misc_feature - Xaa can be any naturally occurring amino acid
  SITE 832: note = misc_feature - Xaa can be any naturally occurring amino acid
  REGION 835..837: note = misc_feature - Each Xaa can independently be any naturally occurring amino acid
  REGION 842..844: note = misc_feature - Each Xaa can independently be any naturally occurring amino acid
  SITE 846: note = misc_feature - Xaa can be any naturally occurring amino acid
  SITE 848: note = misc_feature - Xaa can be any naturally occurring amino acid
  SITE 851: note = misc_feature - Xaa can be any naturally occurring amino acid
  SITE 857: note = misc_feature - Xaa can be any naturally occurring amino acid
  SITE 857: note = misc_feature - Xaa can be any naturally occurring amino acid
MKYXIGLDIGTNSVGWAVTDXYXXKXKGXXXIXKNXGLFDGTARXRTARRRRRXNRIYLQIFXEMDFFRLXSFVXXKXXXPXFXXEYHXXPTIYHLRXLXKDLRLXYLALAHXIKXRGNFLIEGXXNXXXXXXYXFXIXXXXXXXXXPEKGFXXXLXGXFXFXLEXXXKXXYXXXLXLLIGDXYXXXFXAKXXXXLSXXVTXALSXXMIXRXXHDLLKXXYXEXFXKGYAGYIDGXQFYXXKLXXXGXXXKXXXEXXLRKQRTFDNGXIPXQXHLEXAIXXQXYPFLNXXIXXXTFRIPYXVGPLAGXSFAWRKIPWNXXXXDSAFIXXMTDLPXXXVLPKHSLYXXVYNELTKVXXXXXXKXIFKRKVXXXXGXXFNXSTYHDLXXXXXLDXNXXEXIXLTXFEDXMIXXLXXXXKXLRRXYTGWGXLSXLXGIRXXXSTILDXLDNRNXMQLIXDLXFKIKQXXXXXGSPAIKKGILQXXKXVDELVXMGPXIVXEMARENQTXGNSXRKXXKEXGSXILKEXXNLXNXXLXLYYLQNGXDMYXXLDILSXYDXDHIXPQXFXDXSIDNVLSNRKDXVPXXVXKKXWXLXLXXXRKFDLTKAERGGLXDKAFIXRQLVETRQITKXVAXLXXNXDXXXXVXXXTLKSLVSXFRKXFXXLYKVXXNXXHHAHDAYLNVXXLXYPXLEEFVYGDYXXKATKFYXNIMXFXXGEXWKXXXXVXMQXNXVKKEQXXXPKNSXLXKDKYGGXXXXXXKGKXXXXIXXXXXXFLXGYXXXXLPKYXLXXXGXRXLASEXKGNXLXXLXAXXXXXXXXEXXXXFXANXXXXXLXXGXAFXXXIRRYXXXTXIXQSXTGLYEXRL

SEQ ID NO: 15 - protein, 8 aa, synthetic construct
  REGION 1..8: note = RuvC-like domain
  VARIANT 2: note = Xaa is Val or His
  VARIANT 3: note = Xaa is Ile, Leu, or Val
  VARIANT 5: note = Xaa is Met or Thr
IXXEXARE

SEQ ID NO: 16 - protein, 8 aa, synthetic construct
  REGION 1..8: note = RuvC-like domain
  VARIANT 3: note = Xaa is Ile, Leu, or Val
IVXEMARE

SEQ ID NO: 17 - protein, 8 aa, synthetic construct
  REGION 1..8: note = RuvC-like domain
  VARIANT 4: note = Xaa is His or Leu
  VARIANT 7: note = Xaa is Arg or Val
  VARIANT 8: note = Xaa is Glu or Val
HHAXDAXX

SEQ ID NO: 18 - protein, 8 aa, synthetic construct
  REGION 1..8: note = RuvC-like domain
HHAHDAYL

SEQ ID NO: 19 - protein, 30 aa, synthetic construct
  REGION 1..30: note = N-terminal RuvC-like domain
  VARIANT 2: note = Xaa is Lys or Pro
  VARIANT 4: note = Xaa is Val, Leu, Ile, or Phe
  VARIANT 5: note = Xaa is Gly, Ala, or Ser
  VARIANT 6: note = Xaa is Leu, Ile, Val, or Phe
  MOD_RES 7..26: note = N-terminal RuvC-like domain, each Xaa can be any amino acid or absent, region may encompass 5-20 residues
  VARIANT 29: note = Xaa is Asp, Glu, Asn, or Gln
KXYXXXXXXXXXXXXXXXXXXXXXXXTDXY

SEQ ID NO: 20 - skipped

SEQ ID NO: 21 - protein, 12 aa, synthetic construct
  REGION 1..12: note = N-terminal RuvC-like domain
  VARIANT 2: note = Xaa is Ile, Val, Met, Leu, or Thr
  VARIANT 4: note = Xaa is Thr, Ile, Val, Ser, Asn, Tyr, Glu, or Leu
  VARIANT 5: note = Xaa is Asn, Ser, Gly, Ala, Asp, Thr, Arg, Met, or Phe
  VARIANT 7: note = Xaa is Val, Ile, Leu, Cys, Thr, or Phe
  VARIANT 9: note = Xaa is Trp, Phe, Val, Tyr, Ser, or Leu
  VARIANT 10: note = Xaa is Ala, Ser, Cys, Val, or Gly
  VARIANT 11: note = Xaa is Val, Ile, Leu, Ala, Met, or His
  VARIANT 12: note = Any amino acid or absent
DXGXXSXGXXXX

SEQ ID NO: 22 - protein, 12 aa, synthetic construct
  REGION 1..12: note = N-terminal RuvC-like domain
  VARIANT 4: note = Xaa is Thr, Ile, Val, Ser, Asn, Tyr, Glu, or Leu
  VARIANT 5: note = Xaa is Asn, Ser, Gly, Ala, Asp, Thr, Arg, Met, or Phe
  VARIANT 11: note = Xaa is Val, Ile, Leu, Ala, Met, or His
  VARIANT 12: note = Any amino acid or absent
DIGXXSVGWAXX

SEQ ID NO: 23 - protein, 12 aa, synthetic construct
  REGION 1..12: note = N-terminal RuvC-like domain
  MOD_RES 12: note = Any non-polar alkyl amino acid or a hydroxyl amino acid
DIGTNSVGWAVX

SEQ ID NO: 24 - protein, 73 aa, synthetic construct
  REGION 1..73: note = HNH-like domain
  VARIANT 8: note = Xaa is Lys or Arg
  VARIANT 12: note = Xaa is Val or Thr
  VARIANT 13: note = Xaa is Gly or Asp
  VARIANT 14: note = Xaa is Glu, Gln, or Asp
  VARIANT 15: note = Xaa is Glu or Asp
  VARIANT 19: note = Xaa is Asp, Asn, or His
  VARIANT 20: note = Xaa is Tyr, Arg, or Asn
  VARIANT 23: note = Xaa is Gln, Asp, or Asn
  MOD_RES 25..64: note = HNH-like domain, each Xaa can be any amino acid or absent, region may encompass 15-40 residues
  VARIANT 67: note = Xaa is Gly or Glu
  VARIANT 69: note = Xaa is Ser or Gly
  VARIANT 71: note = Xaa is Asp or Asn
LYYLQNGXDMYXXXXLDIXXLSXYXXXXXXXXXXXXXXXXXXXXXXXXXXXXXXXXXXXXXXXXNRXKXDXVP

SEQ ID NO: 25 - protein, 27 aa, synthetic construct
  REGION 1..27: note = HNH-like domain
  VARIANT 1: note = Xaa is Asp, Glu, Gln, or Asn
  VARIANT 2: note = Xaa is Leu, Ile, Arg, Gln, Val, Met, or Lys
  VARIANT 3: note = Xaa is Asp or Glu
  VARIANT 5: note = Xaa is Ile, Val, Thr, Ala, or Leu
  VARIANT 6: note = Xaa is Val, Tyr, Ile, Leu, Phe, or Trp
  VARIANT 8: note = Xaa is Gln, His, Arg, Lys, Tyr, Ile, Leu, Phe, or Trp
  VARIANT 9: note = Xaa is Ser, Ala, Asp, Thr, or Lys
  VARIANT 10: note = Xaa is Phe, Leu, Val, Lys, Tyr, Met, Ile, Arg, Ala, Glu, Asp, or Gln
  VARIANT 11: note = Xaa is Leu, Arg, Thr, Ile, Val, Ser, Cys, Tyr, Lys, Phe, or Gly
  VARIANT 12: note = Xaa is Lys, Gln, Tyr, Thr, Phe, Leu, Trp, Met, Ala, Glu, Gly, or Ser
  VARIANT 13: note = Xaa is Asp, Ser, Asn, Arg, Leu, or Thr
  VARIANT 14: note = Xaa is Asp, Asn, or Ser
  VARIANT 15: note = Xaa is Ser, Ala, Thr, Gly, or Arg
  VARIANT 16: note = Xaa is Ile, Leu, Phe, Ser, Arg, Tyr, Gln, Trp, Asp, Lys, or His
  VARIANT 17: note = Xaa is Asp, Ser, Ile, Asn, Glu, Ala, His, Phe, Leu, Gln, Met, Gly, Tyr, or Val
  VARIANT 19: note = Xaa is Lys, Leu, Arg, Met, Thr, or Phe
  VARIANT 20: note = Xaa is Val, Leu, Ile, Ala, or Thr
  VARIANT 21: note = Xaa is Leu, Ile, Val, or Ala
  VARIANT 22: note = Xaa is Thr, Val, Cys, Glu, Ser, or Ala
  VARIANT 23: note = Xaa is Arg, Phe, Thr, Trp, Glu, Leu, Asn, Cys, Lys, Val, Ser, Gln, Ile, Tyr, His, or Ala
  VARIANT 24: note = Xaa is Ser, Pro, Arg, Lys, Asn, Ala, His, Gln, Gly, or Leu
  VARIANT 25: note = Xaa is Asp, Gly, Thr, Asn, Ser, Lys, Ala, Ile, Glu, Leu, Gln, Arg, or Tyr
  VARIANT 26: note = Xaa is Lys, Val, Ala, Glu, Tyr, Ile, Cys, Leu, Ser, Thr, Gly, Lys, Met, Asp, or Phe
XXXHXXPXXXXXXXXXXNXXXXXXXXN

SEQ ID NO: 26 - protein, 27 aa, synthetic construct
  REGION 1..27: note = HNH-like domain
  VARIANT 1: note = Xaa is Asp or Glu
  VARIANT 2: note = Xaa is Leu, Ile, Arg, Gln, Val, Met, or Lys
  VARIANT 3: note = Xaa is Asp or Glu
  VARIANT 5: note = Xaa is Ile, Val, Thr, Ala, or Leu
  VARIANT 6: note = Xaa is Val, Tyr, Ile, Leu, Phe, or Trp
  VARIANT 8: note = Xaa is Gln, His, Arg, Lys, Tyr, Ile, Leu, Phe, or Trp
  VARIANT 10: note = Xaa is Phe, Leu, Val, Lys, Tyr, Met, Ile, Arg, Ala, Glu, Asp, or Gln
  VARIANT 11: note = Xaa is Leu, Arg, Thr, Ile, Val, Ser, Cys, Tyr, Lys, Phe, or Gly
  VARIANT 12: note = Xaa is Lys, Gln, Tyr, Thr, Phe, Leu, Trp, Met, Ala, Glu, Gly, or Ser
  VARIANT 16: note = Xaa is Ile, Leu, Phe, Ser, Arg, Tyr, Gln, Trp, Asp, Lys, or His
  VARIANT 17: note = Xaa is Asp, Ser, Ile, Asn, Glu, Ala, His, Phe, Leu, Gln, Met, Gly, Tyr, or Val
  VARIANT 22: note = Xaa is Thr, Val, Cys, Glu, Ser, or Ala
  VARIANT 23: note = Xaa is Arg, Phe, Thr, Trp, Glu, Leu, Asn, Cys, Lys, Val, Ser, Gln, Ile, Tyr, His, or Ala
  VARIANT 24: note = Xaa is Ser, Pro, Arg, Lys, Asn, Ala, His, Gln, Gly, or Leu
  VARIANT 25: note = Xaa is Asp, Gly, Thr, Asn, Ser, Lys, Ala, Ile, Glu, Leu, Gln, Arg, or Tyr
  VARIANT 26: note = Xaa is Lys, Val, Ala, Glu, Tyr, Ile, Cys, Leu, Ser, Thr, Gly, Lys, Met, Asp, or Phe
XXXHXXPXSXXXDDSXXNKVLXXXXXN

SEQ ID NO: 27 - protein, 27 aa, synthetic construct
  REGION 1..27: note = HNH-like domain
  VARIANT 1: note = Xaa is Asp or Glu
  VARIANT 3: note = Xaa is Asp or Glu
  VARIANT 8: note = Xaa is Gln, His, Arg, Lys, Tyr, Ile, Leu, or Trp
  VARIANT 10: note = Xaa is Phe, Leu, Val, Lys, Tyr, Met, Ile, Arg, Ala, Glu, Asp, or Gln
  VARIANT 11: note = Xaa is Leu, Arg, Thr, Ile, Val, Ser, Cys, Tyr, Lys, Phe, or Gly
  VARIANT 12: note = Xaa is Lys, Gln, Tyr, Thr, Phe, Leu, Trp, Met, Ala, Glu, Gly, or Ser
  VARIANT 16: note = Xaa is Ile, Leu, Phe, Ser, Arg, Tyr, Gln, Trp, Asp, Lys, or His
  VARIANT 17: note = Xaa is Asp, Ser, Ile, Asn, Glu, Ala, His, Phe, Leu, Gln, Met, Gly, Tyr, or Val
  VARIANT 23: note = Xaa is Arg, Phe, Thr, Trp, Glu, Leu, Asn, Cys, Lys, Val, Ser, Gln, Ile, Tyr, His, or Ala
  VARIANT 24: note = Xaa is Ser, Pro, Arg, Lys, Asn, Ala, His, Gln, Gly, or Leu
  VARIANT 25: note = Xaa is Asp, Gly, Thr, Asn, Ser, Lys, Ala, Ile, Glu, Leu, Gln, Arg, or Tyr
  VARIANT 26: note = Xaa is Lys, Val, Ala, Glu, Tyr, Ile, Cys, Leu, Ser, Thr, Gly, Lys, Met, Asp, or Phe
XVXHIVPXSXXXDDSXXNKVLTXXXXN

SEQ ID NO: 28 - protein, 27 aa, synthetic construct
  REGION 1..27: note = HNH-like domain
  VARIANT 2: note = Xaa is Ile or Val
  VARIANT 6: note = Xaa is Ile or Val
  VARIANT 9: note = Xaa is Ala or Ser
  VARIANT 11: note = Xaa is Ile or Leu
  VARIANT 12: note = Xaa is Lys or Thr
  VARIANT 14: note = Xaa is Asp or Asn
  VARIANT 19: note = Xaa is Arg, Lys, or Leu
  VARIANT 22: note = Xaa is Thr or Val
  VARIANT 23: note = Xaa is Ser or Arg
  VARIANT 25: note = Xaa is Lys, Asp, or Ala
  VARIANT 26: note = Xaa is Glu, Lys, Gly, or Asn
DXDHIXPQXFXXDXSIDNXVLXXSXXN

SEQ ID NO: 29 - RNA, 116 nt, synthetic construct
  misc_feature 1..116: note = gRNA
  misc_feature 1..20: note = a, c, u, g, unknown or other
  misc_feature 1..20: note = targeting region
  misc_feature 21..42: note = first complementarity domain
  misc_feature 43..46: note = linking domain
  misc_feature 47..70: note = second complementarity domain
  source 1..116: mol_type = other RNA
nnnnnnnnnnnnnnnnnnnngttttagagctatgctgttttggaaacaaaacagcatagcaagttaaaataaggctagtccgttatcaacttgaaaaagtggcaccgagtcggtgc

SEQ ID NO: 30 - RNA, 116 nt, synthetic construct
  misc_feature 1..116: note = gRNA
  misc_feature 1..20: note = a, c, u, g, unknown or other
  misc_feature 1..20: note = targeting region
  misc_feature 21..42: note = first complementarity domain
  misc_feature 43..46: note = linking domain
  misc_feature 47..70: note = second complementarity domain
  source 1..116: mol_type = other RNA
nnnnnnnnnnnnnnnnnnnngtattagagctatgctgtattggaaacaatacagcatagcaagttaatataaggctagtccgttatcaacttgaaaaagtggcaccgagtcggtgc

SEQ ID NO: 31 - RNA, 96 nt, synthetic construct
  misc_feature 1..96: note = gRNA
  misc_feature 1..20: note = a, c, u, g, unknown or other
  misc_feature 1..20: note = targeting domain
  misc_feature 21..32: note = first complementarity domain
  misc_feature 33..36: note = linking domain
  misc_feature 37..50: note = second complementarity domain
  misc_feature 51..62: note = proximal domain
  source 1..96: mol_type = other RNA
nnnnnnnnnnnnnnnnnnnngtttaagagctagaaatagcaagtttaaataaggctagtccgttatcaacttgaaaaagtggcaccgagtcggtgc

SEQ ID NO: 32 - RNA, 47 nt, synthetic construct
  misc_feature 1..47: note = gRNA proximal and tail domains derived from S. pyogenes
  source 1..47: mol_type = other RNA
aaggctagtccgttatcaacttgaaaaagtggcaccgagtcggtgct

SEQ ID NO: 33 - RNA, 49 nt, synthetic construct
  misc_feature 1..49: note = gRNA proximal and tail domains
  source 1..49: mol_type = other RNA
aaggctagtccgttatcaacttgaaaaagtggcaccgagtcggtggtgc

SEQ ID NO: 34 - RNA, 51 nt, synthetic construct
  misc_feature 1..51: note = gRNA proximal and tail domains
  source 1..51: mol_type = other RNA
aaggctagtccgttatcaacttgaaaaagtggcaccgagtcggtgcggatc

SEQ ID NO: 35 - RNA, 31 nt, synthetic construct
  misc_feature 1..31: note = gRNA proximal and tail domains
  source 1..31: mol_type = other RNA
aaggctagtccgttatcaacttgaaaaagtg

SEQ ID NO: 36 - RNA, 18 nt, synthetic construct
  misc_feature 1..18: note = gRNA proximal and tail domains
  source 1..18: mol_type = other RNA
aaggctagtccgttatca

SEQ ID NO: 37 - RNA, 12 nt, synthetic construct
  misc_feature 1..12: note = gRNA proximal and tail domains
  source 1..12: mol_type = other RNA
aaggctagtccg

SEQ ID NO: 38 - RNA, 102 nt, synthetic construct
  misc_feature 1..102: note = Unimolecular gRNA derived from S. aureus
  misc_feature 1..20: note = n is a, c, g, or u
  misc_feature 1..20: note = Targeting domain
  source 1..102: mol_type = other RNA
nnnnnnnnnnnnnnnnnnnngttttagtactctggaaacagaatctactaaaacaaggcaaaatgccgtgtttatctcgtcaacttgttggcgagatttttt

SEQ ID NO: 39 - RNA, 42 nt, synthetic construct
  misc_feature 1..42: note = Modular gRNA derived from S. pyogenes
  misc_feature 1..20: note = a, c, u, g, unknown or other
  misc_feature 1..20: note = Targeting domain
  misc_feature 21..42: note = First complementarity domain
  source 1..42: mol_type = other RNA
nnnnnnnnnnnnnnnnnnnngttttagagctatgctgttttg

SEQ ID NO: 40 - RNA, 85 nt, synthetic construct
  misc_feature 1..85: note = Modular gRNA derived from S. pyogenes
  misc_feature 1..9: note = 5' extension domain
  misc_feature 10..33: note = Second complementarity domain
  misc_feature 34..45: note = Proximal domain
  misc_feature 46..85: note = Tail domain
  source 1..85: mol_type = other RNA
ggaaccattcaaaacagcatagcaagttaaaataaggctagtccgttatcaacttgaaaaagtggcaccgagtcggtgctttttt

SEQ ID NO: 41 - RNA, 62 nt, synthetic construct
  misc_feature 1..62: note = Unimolecular gRNA derived from S. pyogenes
  misc_feature 1..20: note = a, c, u, g, unknown or other
  misc_feature 1..20: note = Targeting domain
  misc_feature 21..32: note = First complementarity domain
  misc_feature 33..36: note = Linking domain
  misc_feature 37..50: note = Second complementarity domain
  misc_feature 51..62: note = Proximal domain
  source 1..62: mol_type = other RNA
nnnnnnnnnnnnnnnnnnnngttttagagctagaaatagcaagttaaaataaggctagtccg

SEQ ID NO: 42 - RNA, 102 nt, synthetic construct
  misc_feature 1..102: note = Unimolecular gRNA derived from S. pyogenes
  misc_feature 1..20: note = a, c, u, g, unknown or other
  misc_feature 1..20: note = Targeting domain
  misc_feature 21..32: note = First complementarity domain
  misc_feature 33..36: note = Linking domain
  misc_feature 37..50: note = Second complementarity domain
  misc_feature 51..62: note = Proximal domain
  misc_feature 63..102: note = Tail domain
  source 1..102: mol_type = other RNA
nnnnnnnnnnnnnnnnnnnngttttagagctagaaatagcaagttaaaataaggctagtccgttatcaacttgaaaaagtggcaccgagtcggtgctttttt

SEQ ID NO: 43 - RNA, 75 nt, synthetic construct
  misc_feature 1..75: note = Unimolecular gRNA derived from S. pyogenes
  misc_feature 1..20: note = Targeting domain
  misc_feature 1..20: note = a, c, u, g, unknown or other
  misc_feature 21..36: note = First complementarity domain
  misc_feature 37..40: note = Linking domain
  misc_feature 41..58: note = Second complementarity domain
  misc_feature 59..70: note = Proximal domain
  misc_feature 71..75: note = Tail domain
  source 1..75: mol_type = other RNA
nnnnnnnnnnnnnnnnnnnngttttagagctatgctgaaaagcatagcaagttaaaataaggctagtccgttatc

SEQ ID NO: 44 - RNA, 87 nt, synthetic construct
  misc_feature 1..87: note = Unimolecular gRNA derived from S. pyogenes
  misc_feature 1..20: note = a, c, u, g, unknown or other
  misc_feature 1..20: note = Targeting domain
  misc_feature 21..32: note = First complementarity domain
  misc_feature 43..46: note = Linking domain
  misc_feature 57..70: note = Second complementarity domain
  misc_feature 71..82: note = Proximal domain
  misc_feature 83..87: note = Tail domain
  source 1..87: mol_type = other RNA
nnnnnnnnnnnnnnnnnnnngttttagagctatgctgttttggaaacaaaacagcatagcaagttaaaataaggctagtccgttatc

SEQ ID NO: 45 - RNA, 42 nt, synthetic construct
  misc_feature 1..42: note = Modular gRNA derived from S. thermophilus
  misc_feature 1..20: note = a, c, u, g, unknown or other
  misc_feature 1..20: note = Targeting domain
  misc_feature 21..42: note = First complementarity domain
  source 1..42: mol_type = other RNA
nnnnnnnnnnnnnnnnnnnngttttagagctgtgttgtttcg

SEQ ID NO: 46 - RNA, 78 nt, synthetic construct
  misc_feature 1..78: note = Modular gRNA derived from S. thermophilus
  misc_feature 1..3: note = 5' extension domain
  misc_feature 4..27: note = Second complementarity domain
  misc_feature 28..40: note = Proximal domain
  misc_feature 41..78: note = Tail domain
  source 1..78: mol_type = other RNA
gggcgaaacaacacagcgagttaaaataaggcttagtccgtactcaacttgaaaaggtggcaccgattcggtgttttt

SEQ ID NO: 47 - RNA, 85 nt, synthetic construct
  misc_feature 1..85: note = Modular gRNA derived from S. pyogenes
  source 1..85: mol_type = other RNA
gaaccattcaaaacagcatagcaagttaaaataaggctagtccgttatcaacttgaaaaagtggcaccgagtcggtgcttttttt

SEQ ID NO: 48 - RNA, 96 nt, synthetic construct
  misc_feature 1..96: note = gRNA from S. pyogenes
  misc_feature 1..20: note = n is a, c, g, or u
  misc_feature 1..20: note = Targeting domain
  source 1..96: mol_type = other RNA
nnnnnnnnnnnnnnnnnnnngttttagagctagaaatagcaagttaaaataaggctagtccgttatcaacttgaaaaagtggcaccgagtcggtgc

SEQ ID NO: 49 - RNA, 96 nt, synthetic construct
  misc_feature 1..96: note = gRNA
  misc_feature 1..20: note = n is a, c, g, or u
  misc_feature 1..20: note = Targeting domain
  misc_feature 21..32: note = First complementarity domain
  misc_feature 33..36: note = Linking domain
  misc_feature 37..50: note = Second complementarity domain
  misc_feature 51..62: note = Proximal domain
  source 1..96: mol_type = other RNA
nnnnnnnnnnnnnnnnnnnngtattagagctagaaatagcaagttaatataaggctagtccgttatcaacttgaaaaagtggcaccgagtcggtgc

SEQ ID NO: 50 - RNA, 104 nt, synthetic construct
  misc_feature 1..104: note = gRNA
  misc_feature 1..20: note = n is a, c, g, or u
  misc_feature 1..20: note = Targeting domain
  misc_feature 21..36: note = First complementarity domain
  misc_feature 37..40: note = Linking domain
  misc_feature 41..58: note = Second complementarity domain
  source 1..104: mol_type = other RNA
nnnnnnnnnnnnnnnnnnnngttttagagctatgctgaaaagcatagcaagttaaaataaggctagtccgttatcaacttgaaaaagtggcaccgagtcggtgc

SEQ ID NO: 51 - RNA, 106 nt, synthetic construct
  misc_feature 1..106: note = gRNA
  misc_feature 1..20: note = n is a, c, g, or u
  misc_feature 1..20: note = Targeting domain
  misc_feature 21..37: note = First complementarity domain
  misc_feature 38..41: note = Linking domain
  misc_feature 42..60: note = Second complementarity domain
  source 1..106: mol_type = other RNA
nnnnnnnnnnnnnnnnnnnngttttagagctatgctggaaacagcatagcaagttaaaataaggctagtccgttatcaacttgaaaaagtggcaccgagtcggtgc

SEQ ID NO: 52 - protein, 12 aa, Peptoniphilus duerdenii
DIGTASVGWAVT

SEQ ID NO: 53 - protein, 12 aa, Treponema denticola
DVGTGSVGWAVT

SEQ ID NO: 54 - protein, 12 aa, Streptococcus mutans
DIGTNSVGWAVV

SEQ ID NO: 55 - protein, 12 aa, Streptococcus mutans
DIGTNSVGWAVI

SEQ ID NO: 56 - protein, 12 aa, Streptococcus mutans
DIGTNSVGWAVL

SEQ ID NO: 57 - protein, 12 aa, Streptococcus mutans
DLGTNSIGWAVV

SEQ ID NO: 58 - protein, 11 aa, Pedobacter glucosidilyticus
DLGTNSIGWAI

SEQ ID NO: 59 - protein, 12 aa, Streptococcus mutans
DLGTNSIGWALV

SEQ ID NO: 60 - protein, 12 aa, Fusobacterium nucleatum
DIGTNSVGWCVT

SEQ ID NO: 61 - protein, 12 aa, Streptococcus mutans
DIGTNSVGYAVT

SEQ ID NO: 62 - protein, 12 aa, Streptococcus mutans
DMGTGSLGWAVT

SEQ ID NO: 63 - protein, 12 aa, Streptococcus mutans
DIGTSSVGWAAI

SEQ ID NO: 64 - protein, 12 aa, Streptococcus mutans
DLGTGSVGWAVV

SEQ ID NO: 65 - protein, 12 aa, Streptococcus mutans
DLGVGSVGWAIV

SEQ ID NO: 66 - protein, 12 aa, Streptococcus mutans
DLGIASIGWAII

SEQ ID NO: 67 - protein, 12 aa, Streptococcus mutans
DLGIASVGWAIV

SEQ ID NO: 68 - protein, 12 aa, Streptococcus mutans
DLGVASVGWSIV

SEQ ID NO: 69 - protein, 12 aa, Eubacterium rectale
DIGIASVGWAIL

SEQ ID NO: 70 - protein, 12 aa, Streptococcus mutans
DLGISSVGWSVI

SEQ ID NO: 71 - protein, 12 aa, Streptococcus mutans
DIGIASVGWSVI

SEQ ID NO: 72 - protein, 12 aa, Streptococcus mutans
DVGIGSIGWAVI

SEQ ID NO: 73 - protein, 12 aa, Streptococcus mutans
DLGVGSIGFAIV

SEQ ID NO: 74 - protein, 12 aa, Akkermansia muciniphila
DIGYASIGWAVI

SEQ ID NO: 75 - protein, 12 aa, Prevotella ruminicola
DTGTNSLGWAIV

SEQ ID NO: 76 - protein, 12 aa, Cand. Puniceispirillum marinum
DLGTNSIGWCLL

SEQ ID NO: 77 - protein, 12 aa, Rhodospirillum rubrum
DIGTDSLGWAVF

SEQ ID NO: 78 - protein, 12 aa, Streptococcus mutans
DIGSNSIGFAVV

SEQ ID NO: 79 - protein, 12 aa, Streptococcus mutans
DLGVGSIGVAVA

SEQ ID NO: 80 - protein, 12 aa, Rhodopseudomonas palustris
DLGIASCGWGVV

SEQ ID NO: 81 - protein, 12 aa, Streptococcus mutans
DLGIASVGWCLT

SEQ ID NO: 82 - protein, 12 aa, Streptococcus mutans
DIGIGSVGVGIL

SEQ ID NO: 83 - protein, 12 aa, Streptococcus mutans
DIGITSVGYGLI

SEQ ID NO: 84 - protein, 12 aa, Streptococcus mutans
DIGITSVGFGII

SEQ ID NO: 85 - protein, 12 aa, Streptococcus mutans
DVGITSTGYAVL

SEQ ID NO: 86 - protein, 12 aa, Streptococcus mutans
DLGITSFGYAIL

SEQ ID NO: 87 - protein, 12 aa, Streptococcus mutans
DIGNASVGWSAF

SEQ ID NO: 88 - protein, 12 aa, Lactobacillus gasseri
DVGTNSCGWVAM

SEQ ID NO: 89 - protein, 12 aa, Streptococcus mutans
DVGERSIGLAAV

SEQ ID NO: 90 - protein, 12 aa, Streptococcus mutans
DVGLNSVGLAAV

SEQ ID NO: 91 - protein, 12 aa, Bifidobacterium dentium
DVGLMSVGLAAI

SEQ ID NO: 92 - protein, 12 aa, Corynebacterium diphtheriae
DVGTFSVGLAAI

SEQ ID NO: 93 - protein, 12 aa, Streptococcus mutans
DIGTGSVGYACM

SEQ ID NO: 94 - protein, 12 aa, Capnocytophaga ochracea
DLGTTSIGFAHI

SEQ ID NO: 95 - protein, 12 aa, Prevotella denticola
DLGTNSIGSSVR

SEQ ID NO: 96 - protein, 12 aa, Ralstonia solanacearum
DIGTNSIGWAVI

SEQ ID NO: 97 - protein, 12 aa, Streptococcus mutans
DLGIASVGWAVV

SEQ ID NO: 98 - protein, 12 aa, Comamonas granuli
DIGIASVGWAVL

SEQ ID NO: 99 - protein, 12 aa, Streptococcus mutans
DIGIASIGWAVI

SEQ ID NO: 100 - protein, 12 aa, Agathobacter rectalis
DIGIASVGWAII

SEQ ID NO: 101 - protein, 12 aa, Streptococcus mutans
DVGIASVGWAVI

SEQ ID NO: 102 - protein, 11 aa, Streptococcus mutans
DIGIASVGWAL

SEQ ID NO: 103 - protein, 12 aa, Neisseria meningitidis
DIGIASVGWAMV

SEQ ID NO: 104 - protein, 12 aa, Clostridium perfringens
DIGITSVGWAVI

SEQ ID NO: 105 - protein, 12 aa, Streptococcus mutans
DLGISSLGWAIV

SEQ ID NO: 106 - protein, 12 aa, Streptococcus mutans
DLGTNSIGWGLL

SEQ ID NO: 107 - protein, 12 aa, Verminephrobacter eiseniae
DLGSTSLGWAIF

SEQ ID NO: 108 - protein, 12 aa, Streptococcus mutans
DIGISSIGWAFS

SEQ ID NO: 109 - protein, 12 aa, Streptococcus mutans
DIGTTSIGFSVI

SEQ ID NO: 110 - protein, 12 aa, Streptococcus mutans
DIGTSSIGWWLY

SEQ ID NO: 111 - protein, 12 aa, Streptococcus mutans
DLGSNSLGWFVT

SEQ ID NO: 112 - protein, 12 aa, Streptococcus mutans
DLGANSLGWFVV

SEQ ID NO: 113 - protein, 15 aa, Bacillus cereus
DIGLRIGITSCGWSI

SEQ ID NO: 114 - protein, 12 aa, Sutterella wadsworthensis
DMGAKYTGVFYA

SEQ ID NO: 115 - protein, 12 aa, Streptococcus mutans
DLGGKNTGFFSF

SEQ ID NO: 116 - protein, 12 aa, Francisella tularensis
DLGVKNTGVFSA

SEQ ID NO: 117 - protein, 12 aa, Streptococcus mutans
DLGAKFTGVALY

SEQ ID NO: 118 - protein, 12 aa, Streptococcus mutans
DLGGKFTGVCLS

SEQ ID NO: 119 - protein, 12 aa, Parasutterella excrementihominis
DLGGTYTGTFIT

SEQ ID NO: 120 - protein, 12 aa, Streptococcus mutans
DIGTNSVGWAVT

SEQ ID NO: 121 - protein, 12 aa, Eubacterium yurii
DVGTNSVGWAVT

SEQ ID NO: 122 - protein, 12 aa, Butyrivibrio hungatei
DMGTNSVGWAVT

SEQ ID NO: 123 - protein, 12 aa, Streptococcus mutans
DVGTSSVGWAVT

SEQ ID NO: 124 - protein, 27 aa, Treponema denticola
DIDHIYPQSKIKDDSISNRVLVCSSCN

SEQ ID NO: 125 - protein, 27 aa, Streptococcus mutans
DIDHIYPQSKTMDDSLNNRVLVKKNYN

SEQ ID NO: 126 - protein, 27 aa, Peptoniphilus duerdenii
DQDHIYPKSKIYDDSLENRVLVKKNLN

SEQ ID NO: 127 - protein, 27 aa, Streptococcus mutans
QIDHIVPQSLVKDDSFDNRVLVVPSEN

SEQ ID NO: 128 - protein, 27 aa, Streptococcus mutans
DIDHIIPQAFIKDNSIDNRVLTSSKEN

SEQ ID NO: 129 - protein, 27 aa, Streptococcus mutans
DIDHIIPQAFLKDNSIDNKVLVSSASN

SEQ ID NO: 130 - protein, 27 aa, Streptococcus mutans
DIDHIIPQAYTKDNSLDNRVLVSNITN

SEQ ID NO: 131 - protein, 27 aa, Streptococcus mutans
DIDHIVPQSFITDNSIDNLVLTSSAGN

SEQ ID NO: 132 - protein, 27 aa, Streptococcus mutans
DVDHIVPQSFLKDDSIDNKVLTRSDKN

SEQ ID NO: 133 - protein, 27 aa, Streptococcus mutans
NIDHIYPQSMVKDDSLDNKVLVQSEIN

SEQ ID NO: 134 - protein, 27 aa, Streptococcus mutans
DIDHILPQSLIKDDSLDNRVLVNATIN

SEQ ID NO: 135 - protein, 27 aa, Lactobacillus gasseri
DIDHILPQSFIKDDSLENRVLVKKAVN

SEQ ID NO: 136 - protein, 27 aa, Streptococcus mutans
EVDHIFPRSFIKDDSIDNKVLVIKKMN

SEQ ID NO: 137 - protein, 27 aa, Olsenella uli
EVDHIIPRSYIKDDSFENKVLVYREEN

SEQ ID NO: 138 - protein, 27 aa, Streptococcus mutans
DIDHIIPQAVTQNDSIDNRVLVARAEN

SEQ ID NO: 139 - protein, 27 aa, Streptococcus mutans
EIDHIIPYSISFDDSSSNKLLVLAESN

SEQ ID NO: 140 - protein, 27 aa, Streptococcus mutans
EIDHIIPYSLCFDDSSANKVLVHKQSN

SEQ ID NO: 141 - protein, 27 aa, Streptococcus mutans
DIDHIIPYSRSMDDSYSNKVLVLSGEN

SEQ ID NO: 142 - protein, 27 aa, Streptococcus mutans
DIDHIIPYSKSMDDSFNNKVLCLAEEN

SEQ ID NO: 143 - protein, 27 aa, Campylobacter jejuni
EIDHIYPYSRSFDDSYMNKVLVFTKQN

SEQ ID NO: 144 - protein, 27 aa, Streptococcus mutans
QIDHIYPYSRSMDDSYMNKVLVLTDEN

SEQ ID NO: 145 - protein, 27 aa, Clostridium perfringens
EIDHIIPFSRSFDDSLSNKILVLGSEN

SEQ ID NO: 146 - protein, 27 aa, Streptococcus mutans
EIDHALPFSRTWDDSFNNKVLVLGSEN

SEQ ID NO: 147 - protein, 27 aa, Streptococcus mutans
EIDHALPFSRTWDDSFNNKVLVLASEN

SEQ ID NO: 148 - protein, 27 aa, Streptococcus mutans
EIDHIIPISISLDDSINNKVLVLSKAN

SEQ ID NO: 149 - protein, 27 aa, Streptococcus mutans
EVDHIIPISISLDDSITNKVLVTHREN

SEQ ID NO: 150 - protein, 27 aa, Acidovorax ebreus
QVDHALPYSRSYDDSKNNKVLVLTHEN

SEQ ID NO: 151 - protein, 27 aa, Streptococcus mutans
EVDHILPLSITFDDSLANKVLVYATAN

SEQ ID NO: 152 - protein, 27 aa, Eubacterium rectale
EIDHIIPRSISFDDARSNKVLVYRSEN

SEQ ID NO: 153 - protein, 27 aa, Streptococcus mutans
EVDHIIPRSVSFDNSYHNKVLVKQSEN

SEQ ID NO: 154 - protein, 27 aa, Roseburia intestinalis
DIDHILPYSITFDDSFRNKVLVTSQEN

SEQ ID NO: 155 - protein, 27 aa, Streptococcus mutans
EIDHILPRSRSADDSFANKVLCLARAN

SEQ ID NO: 156 - protein, 27 aa, Cand. Puniceispirillum marinum
EIEHLLPFSLTLDDSMANKTVCFRQAN

SEQ ID NO: 157 - protein, 27 aa, Streptococcus mutans
DIDHILPFSVSLDDSAANKVVCLREAN

SEQ ID NO: 158 - protein, 27 aa, Streptococcus mutans
DIDHLIPFSISWDDSAANKVVCMRYAN

SEQ ID NO: 159 - protein, 27 aa, Streptococcus mutans
DIDHILPVAMTLDDSPANKIICMRYAN

SEQ ID NO: 160 - protein, 27 aa, Dinoroseobacter shibae
DVDHILPYSRTLDDSFPNRTLCLREAN

SEQ ID NO: 161 - protein, 27 aa, Verminephrobacter eiseniae
EIEHILPFSRTLDDSLNNRTVAMRRAN

SEQ ID NO: 162 - protein, 27 aa, Streptococcus mutans
EVDHIIPYSISWDDSYTNKVLTSAKCN

SEQ ID NO: 163 - protein, 27 aa, Rhodopseudomonas palustris
QVDHILPWSRFGDDSYLNKTLCTARSN

SEQ ID NO: 164 - protein, 27 aa, Streptococcus mutans
QVDHILPFSKTLDDSFANKVLAQHDAN

SEQ ID NO: 165 - protein, 27 aa, Streptococcus mutans
QIDHAFPLSRSLDDSQSNKVLCLTSSN

SEQ ID NO: 166 - protein, 27 aa, Streptococcus mutans
DIDHIVPRSISFDDSFSNLVIVNKLDN

SEQ ID NO: 167 - protein, 27 aa, Streptococcus mutans
EIEHIIPYSMSYDNSQANKILTEKAEN

SEQ ID NO: 168 - protein, 27 aa, Streptococcus mutans
EIDHVIPYSKSADDSWFNKLLVKKSTN

SEQ ID NO: 169 - protein, 27 aa, Streptococcus mutans
EMDHILPYSRSLDNGWHNRVLVHGKDN

SEQ ID NO: 170 - protein, 27 aa, Streptococcus mutans
EVDHIVPYSLILDNTINNKALVYAEEN

SEQ ID NO: 171 - protein, 27 aa, Fibrobacter succinogenes
EIEHVIPQSLYFDDSFSNKVICEAEVN

SEQ ID NO: 172 - protein, 27 aa, Streptococcus mutans
DIEHIIPQARLFDDSFSNKTLEARSVN

SEQ ID NO: 173 - protein, 27 aa, Capnocytophaga sputigena
EIEHIVPKARVFDDSFSNKTLTFHRIN

SEQ ID NO: 174 - protein, 28 aa, Finegoldia magna
DKDHIIPQSMKKDDSIINNLVLVNKNAN

SEQ ID NO: 175 - protein, 27 aa, Streptococcus mutans
EVEHIWPRSRSFDNSPRNKTLCRKDVN

SEQ ID NO: 176 - protein, 27 aa, Bacillus cereus
IVNHIIPYNRSFDDTYHNRVLTLTETK

SEQ ID NO: 177 - protein, 27 aa, Prevotella micans
DMEHTIPKSISFDNSDQNLTLCESYYN

SEQ ID NO: 178 - protein, 27 aa, Prevotella ruminicola
DIEHTIPRSAGGDSTKMNLTLCSSRFN

SEQ ID NO: 179 - protein, 27 aa, Flavobacterium columnare
DIEHTIPRSISQDNSQMNKTLCSLKFN

SEQ ID NO: 180 - protein, 27 aa, Rhodospirillum rubrum
DIDHVIPLARGGRDSLDNMVLCQSDAN

SEQ ID NO: 181 - protein, 27 aa, Streptococcus mutans
DIEHLFPIAESEDNGRNNLVISHSACN

SEQ ID NO: 182 - protein, 27 aa, Streptococcus mutans
DVDHIFPRDDTADNSYGNKVVAHRQCN

SEQ ID NO: 183 - protein, 27 aa, Streptococcus mutans
DIEHIVPQSLGGLSTDYNTIVTLKSVN

SEQ ID NO: 184 - protein, 27 aa, Streptococcus mutans
ELDHIVPRTDGGSNRHENLAITCGACN

SEQ ID NO: 185 - protein, 28 aa, Streptococcus mutans
EMDHIVPRKGVGSTNTRTNFAAVCAECN

SEQ ID NO: 186 - protein, 28 aa, Bifidobacterium dentium
EMDHIVPRKGVGSTNTRVNLAAACAACN

SEQ ID NO: 187 - protein, 28 aa, Corynebacterium diphtheriae
EMDHIVPRAGQGSTNTRENLVAVCHRCN

SEQ ID NO: 188 - protein, 33 aa, Sutterella wadsworthensis
EIDHILPRSLIKDARGIVFNAEPNLIYASSRGN

SEQ ID NO: 189 - protein, 33 aa, Streptococcus mutans
EIDHIIPRSLTGRTKKTVFNSEANLIYCSSKGN

SEQ ID NO: 190 - protein, 33 aa, Parasutterella excrementihominis
EIDHIIPRSLTLKKSESIYNSEVNLIFVSAQGN

SEQ ID NO: 191 - protein, 33 aa, Streptococcus mutans
EIDHIYPRSLSKKHFGVIFNSEVNLIYCSSQGN

SEQ ID NO: 192 - protein, 33 aa, Streptococcus mutans
EIDHILPRSHTLKIYGTVFNPEGNLIYVHQKCN

SEQ ID NO: 193 - protein, 30 aa, Francisella tularensis
ELDHIIPRSHKKYGTLNDEANLICVTRGDN

SEQ ID NO: 194 - protein, 27 aa, Akkermansia muciniphila
ELEHIVPHSFRQSNALSSLVLTWPGVN

SEQ ID NO: 195 - protein, 27 aa, Streptococcus mutans
DIDHIYPRSKIKDDSITNRVLVEKDIN

SEQ ID NO: 196 - protein, 28 aa, Streptococcus mutans
YDIDHIYPRSLTKDDSFDNLVLCERTAN

SEQ ID NO: 197 - protein, 28 aa, Fusobacterium nucleatum
DIDHIYPRSKVIKDDSFDNLVLVLKNEN

SEQ ID NO: 198 - protein, 27 aa, Filifactor alocis
DRDHIYPQSKIKDDSIDNLVLVNKTYN

SEQ ID NO: 199-250 - skipped (52 entries)

SEQ ID NO: 251 - RNA, 17 nt, synthetic construct
  misc_feature 1..17: note = Targeting domain
  source 1..17: mol_type = other RNA
gaaggaaactagctaaa

SEQ ID NO: 252 - RNA, 20 nt, synthetic construct
  misc_feature 1..20: note = Targeting domain
  source 1..20: mol_type = other RNA
ggagaaggaaactagctaaa

SEQ ID NO: 253 - RNA, 20 nt, synthetic construct
  misc_feature 1..20: note = Targeting domain
  source 1..20: mol_type = other RNA
gggagaaggaaactagctaa

SEQ ID NO: 254 - RNA, 20 nt, synthetic construct
  misc_feature 1..20: note = Targeting domain
  source 1..20: mol_type = other RNA
gtatcctctatgatgggaga

SEQ ID NO: 255 - RNA, 20 nt, synthetic construct
  misc_feature 1..20: note = Targeting domain
  source 1..20: mol_type = other RNA
gtttccttctcccatcatag

SEQ ID NO: 256 - RNA, 20 nt, synthetic construct
  misc_feature 1..20: note = Targeting domain
  source 1..20: mol_type = other RNA
gtcctggtatcctctatgat

SEQ ID NO: 257 - RNA, 17 nt, synthetic construct
  misc_feature 1..17: note = Targeting domain
  source 1..17: mol_type = other RNA
agaaggaaactagctaa

SEQ ID NO: 258 - RNA, 17 nt, synthetic construct
  misc_feature 1..17: note = Targeting domain
  source 1..17: mol_type = other RNA
tcctctatgatgggaga

SEQ ID NO: 259 - RNA, 17 nt, synthetic construct
  misc_feature 1..17: note = Targeting domain
  source 1..17: mol_type = other RNA
cctggtatcctctatga

SEQ ID NO: 260 - RNA, 17 nt, synthetic construct
  misc_feature 1..17: note = Targeting domain
  source 1..17: mol_type = other RNA
ccatcatagaggatacc

SEQ ID NO: 261 - RNA, 17 nt, synthetic construct
  misc_feature 1..17: note = Targeting domain
  source 1..17: mol_type = other RNA
tccttctcccatcatag

SEQ ID NO: 262 - RNA, 17 nt, synthetic construct
  misc_feature 1..17: note = Targeting domain
  source 1..17: mol_type = other RNA
tagcagtatcctcttgg

SEQ ID NO: 263 - RNA, 17 nt, synthetic construct
  misc_feature 1..17: note = Targeting domain
  source 1..17: mol_type = other RNA
ttagcagtatcctcttg

SEQ ID NO: 264 - RNA, 17 nt, synthetic construct
  misc_feature 1..17: note = Targeting domain
  source 1..17: mol_type = other RNA
aactggaatgactgaat

SEQ ID NO: 265 - RNA, 17 nt, synthetic construct
  misc_feature 1..17: note = Targeting domain
  source 1..17: mol_type = other RNA
ctggtatcctctatgat

SEQ ID NO: 266 - RNA, 17 nt, synthetic construct
  misc_feature 1..17: note = Targeting domain
  source 1..17: mol_type = other RNA
aattagcagtatcctct

SEQ ID NO: 267 - RNA, 17 nt, synthetic construct
  misc_feature 1..17: note = Targeting domain
  source 1..17: mol_type = other RNA
attagcagtatcctctt

SEQ ID NO: 268 - RNA, 20 nt, synthetic construct
  misc_feature 1..20: note = Targeting domain
  source 1..20: mol_type = other RNA
agtcctggtatcctctatga

SEQ ID NO: 269 - RNA, 20 nt, synthetic construct
  misc_feature 1..20: note = Targeting domain
  source 1..20: mol_type = other RNA
ctcccatcatagaggatacc

SEQ ID NO: 270 - RNA, 20 nt, synthetic construct
  misc_feature 1..20: note = Targeting domain
  source 1..20: mol_type = other RNA
aattagcagtatcctcttgg

SEQ ID NO: 271 - RNA, 20 nt, synthetic construct
  misc_feature 1..20: note = Targeting domain
  source 1..20: mol_type = other RNA
aaattagcagtatcctcttg

SEQ ID NO: 272 - RNA, 20 nt, synthetic construct
  misc_feature 1..20: note = Targeting domain
  source 1..20: mol_type = other RNA
aaaaactggaatgactgaat

SEQ ID NO: 273 - RNA, 20 nt, synthetic construct
  misc_feature 1..20: note = Targeting domain
  source 1..20: mol_type = other RNA
aaaaattagcagtatcctct

SEQ ID NO: 274 - RNA, 20 nt, synthetic construct
  misc_feature 1..20: note = Targeting domain
  source 1..20: mol_type = other RNA
aaaattagcagtatcctctt

SEQ ID NO: 275 - RNA, 17 nt, synthetic construct
  misc_feature 1..17: note = Targeting domain
  source 1..17: mol_type = other RNA
gaatcggaacaaggcaa

SEQ ID NO: 276 - RNA, 17 nt, synthetic construct
  misc_feature 1..17: note = Targeting domain
  source 1..17: mol_type = other RNA
gaccaatagccttgaca

SEQ ID NO: 277 - RNA, 17 nt, synthetic construct
  misc_feature 1..17: note = Targeting domain
  source 1..17: mol_type = other RNA
ggctattggtcaaggca

SEQ ID NO: 278 - RNA, 17 nt, synthetic construct
  misc_feature 1..17: note = Targeting domain
  source 1..17: mol_type = other RNA
gtcaaggctattggtca

SEQ ID NO: 279 - RNA, 17 nt, synthetic construct
  misc_feature 1..17: note = Targeting domain
  source 1..17: mol_type = other RNA
gtgtgtggaactgctga

SEQ ID NO: 280 - RNA, 17 nt, synthetic construct
  misc_feature 1..17: note = Targeting domain
  source 1..17: mol_type = other RNA
gggccggcggctggcta

SEQ ID NO: 281 - RNA, 17 nt, synthetic construct
  misc_feature 1..17: note = Targeting domain
  source 1..17: mol_type = other RNA
gagtatccagtgaggcc

SEQ ID NO: 282 - RNA, 17 nt, synthetic construct
  misc_feature 1..17: note = Targeting domain
  source 1..17: mol_type = other RNA
gctgacaaaagaagtcc

SEQ ID NO: 283 - RNA, 17 nt, synthetic construct
  misc_feature 1..17: note = Targeting domain
  source 1..17: mol_type = other RNA
ggccaggggccggcggc

SEQ ID NO: 284 - RNA, 17 nt, synthetic construct
  misc_feature 1..17: note = Targeting domain
  source 1..17: mol_type = other RNA
gggaaggggcccccaag

SEQ ID NO: 285 - RNA, 17 nt, synthetic construct
  misc_feature 1..17: note = Targeting domain
  source 1..17: mol_type = other RNA
gagatagtgtggggaag

SEQ ID NO: 286 - RNA, 17 nt, synthetic construct
  misc_feature 1..17: note = Targeting domain
  source 1..17: mol_type = other RNA
gtatccagtgaggccag

SEQ ID NO: 287 - RNA, 17 nt, synthetic construct
  misc_feature 1..17: note = Targeting domain
  source 1..17: mol_type = other RNA
gtgaggccaggggccgg

SEQ ID NO: 288 - RNA, 17 nt, synthetic construct
  misc_feature 1..17: note = Targeting domain
  source 1..17: mol_type = other RNA
gctggccaacccatggg

SEQ ID NO: 289 - RNA, 17 nt, synthetic construct
  misc_feature 1..17: note = Targeting domain
  source 1..17: mol_type = other RNA
ggctaaactccacccat

SEQ ID NO: 290 - RNA, 17 nt, synthetic construct
  misc_feature 1..17: note = Targeting domain
  source 1..17: mol_type = other RNA
ggatactctaagactat

SEQ ID NO: 291 - RNA, 17 nt, synthetic construct
  misc_feature 1..17: note = Targeting domain
  source 1..17: mol_type = other RNA
ggggccggcggctggct

SEQ ID NO: 292 - RNA, 20 nt, synthetic construct
  misc_feature 1..20: note = Targeting domain
  source 1..20: mol_type = other RNA
ggctagggatgaagaataaa

SEQ ID NO: 293 - RNA, 20 nt, synthetic construct
  misc_feature 1..20: note = Targeting domain
  source 1..20: mol_type = other RNA
gagtgtgtggaactgctgaa

SEQ ID NO: 294 - RNA, 20 nt, synthetic construct
  misc_feature 1..20: note = Targeting domain
  source 1..20: mol_type = other RNA
ggaatgactgaatcggaaca

SEQ ID NO: 295 - RNA, 20 nt, synthetic construct
  misc_feature 1..20: note = Targeting domain
  source 1..20: mol_type = other RNA
gcattgagatagtgtgggga

SEQ ID NO: 296 - RNA, 20 nt, synthetic construct
  misc_feature 1..20: note = Targeting domain
  source 1..20: mol_type = other RNA
gctattggtcaaggcaaggc

SEQ ID NO: 297 - RNA, 20 nt, synthetic construct
  misc_feature 1..20: note = Targeting domain
  source 1..20: mol_type = other RNA
gtggggaaggggcccccaag

SEQ ID NO: 298 - RNA, 20 nt, synthetic construct
  misc_feature 1..20: note = Targeting domain
  source 1..20: mol_type = other RNA
ggcaaggctggccaacccat

SEQ ID NO: 299 - RNA, 20 nt, synthetic construct
  misc_feature 1..20: note = Targeting domain
  source 1..20: mol_type = other RNA
gtttgccttgtcaaggctat

SEQ ID NO: 300 - RNA, 20 nt, synthetic construct
  misc_feature 1..20: note = Targeting domain
  source 1..20: mol_type = other RNA
gctaaactccacccatgggt

SEQ ID NO: 301 - RNA, 17 nt, synthetic construct
  misc_feature 1..17: note = Targeting domain
  source 1..17: mol_type = other RNA
caaatatctgtctgaaa

SEQ ID NO: 302 - RNA, 17 nt, synthetic construct
  misc_feature 1..17: note = Targeting domain
  source 1..17: mol_type = other RNA
tagggatgaagaataaa

SEQ ID NO: 303 - RNA, 17 nt, synthetic construct
  misc_feature 1..17: note = Targeting domain
  source 1..17: mol_type = other RNA
tgagatagtgtggggaa

SEQ ID NO: 304 - RNA, 17 nt, synthetic construct
  misc_feature 1..17: note = Targeting domain
  source 1..17: mol_type = other RNA
tgtgtggaactgctgaa

SEQ ID NO: 305 - RNA, 17 nt, synthetic construct
  misc_feature 1..17: note = Targeting domain
  source 1..17: mol_type = other RNA
atgactgaatcggaaca

SEQ ID NO: 306 - RNA, 17 nt, synthetic construct
  misc_feature 1..17: note = Targeting domain
  source 1..17: mol_type = other RNA
caaggctggccaaccca

SEQ ID NO: 307 - RNA, 17 nt, synthetic construct
  misc_feature 1..17: note = Targeting domain
  source 1..17: mol_type = other RNA
tggctaaactccaccca

SEQ ID NO: 308 - RNA, 17 nt, synthetic construct
  misc_feature 1..17: note = Targeting domain
  source 1..17: mol_type = other RNA
tgggtggagtttagcca

SEQ ID NO: 309 - RNA, 17 nt, synthetic construct
  misc_feature 1..17: note = Targeting domain
  source 1..17: mol_type = other RNA
agtatccagtgaggcca

SEQ ID NO: 310 - RNA, 17 nt, synthetic construct
  misc_feature 1..17: note = Targeting domain
  source 1..17: mol_type = other RNA
tcaagtttgccttgtca

SEQ ID NO: 311 - RNA, 17 nt, synthetic construct
  misc_feature 1..17: note = Targeting domain
  source 1..17: mol_type = other RNA
ttgagatagtgtgggga

SEQ ID NO: 312 - RNA, 17 nt, synthetic construct
  misc_feature 1..17: note = Targeting domain
  source 1..17: mol_type = other RNA
ataaattagagaaaaac

SEQ ID NO: 313 - RNA, 17 nt, synthetic construct
  misc_feature 1..17: note = Targeting domain
  source 1..17: mol_type = other RNA
ccggcccctggcctcac

SEQ ID NO: 314 - RNA, 17 nt, synthetic construct
  misc_feature 1..17: note = Targeting domain
  source 1..17: mol_type = other RNA
agccagccgccggcccc

SEQ ID NO: 315 - RNA, 17 nt, synthetic construct
  misc_feature 1..17: note = Targeting domain
  source 1..17: mol_type = other RNA
ctgtctgaaacggtccc

SEQ ID NO: 316 - RNA, 17 nt, synthetic construct
  misc_feature 1..17: note = Targeting domain
  source 1..17: mol_type = other RNA
atgggtggagtttagcc

SEQ ID NO: 317 - RNA, 17 nt, synthetic construct
  misc_feature 1..17: note = Targeting domain
  source 1..17: mol_type = other RNA
catccctagccagccgc

SEQ ID NO: 318 - RNA, 17 nt, synthetic construct
  misc_feature 1..17: note = Targeting domain
  source 1..17: mol_type = other RNA
attggtcaaggcaaggc

SEQ ID NO: 319 - RNA, 17 nt, synthetic construct
  misc_feature 1..17: note = Targeting domain
  source 1..17: mol_type = other RNA
ccagtgaggccaggggc

SEQ ID NO: 320 - RNA, 17 nt, synthetic construct
  misc_feature 1..17: note = Targeting domain
  source 1..17: mol_type = other RNA
ttccacacactcgcttc

SEQ ID NO: 321 - RNA, 17 nt, synthetic construct
  misc_feature 1..17: note = Targeting domain
  source 1..17: mol_type = other RNA
cgcttctggaacgtctg

SEQ ID NO: 322 - RNA, 17 nt, synthetic construct
  misc_feature 1..17: note = Targeting domain
  source 1..17: mol_type = other RNA
tcttagagtatccagtg

SEQ ID NO: 323 - RNA, 17 nt, synthetic construct
  misc_feature 1..17: note = Targeting domain
  source 1..17: mol_type = other RNA
tttgcattgagatagtg

SEQ ID NO: 324 - RNA, 17 nt, synthetic construct
  misc_feature 1..17: note = Targeting domain
  source 1..17: mol_type = other RNA
ttccagaagcgagtgtg

SEQ ID NO: 325 - RNA, 17 nt, synthetic construct
  misc_feature 1..17: note = Targeting domain
  source 1..17: mol_type = other RNA
tgcattgagatagtgtg

SEQ ID NO: 326 - RNA, 17 nt, synthetic construct
  misc_feature 1..17: note = Targeting domain
  source 1..17: mol_type = other RNA
aaggctggccaacccat

SEQ ID NO: 327 - RNA, 17 nt, synthetic construct
  misc_feature 1..17: note = Targeting domain
  source 1..17: mol_type = other RNA
tgccttgtcaaggctat

SEQ ID NO: 328 - RNA, 17 nt, synthetic construct
  misc_feature 1..17: note = Targeting domain
  source 1..17: mol_type = other RNA
aaactccacccatgggt

SEQ ID NO: 329 - RNA, 17 nt, synthetic construct
  misc_feature 1..17: note = Targeting domain
  source 1..17: mol_type = other RNA
ttgcattgagatagtgt

SEQ ID NO: 330 - RNA, 20 nt, synthetic construct
  misc_feature 1..20: note = Targeting domain
  source 1..20: mol_type = other RNA
atgcaaatatctgtctgaaa

SEQ ID NO: 331 - RNA, 20 nt, synthetic construct
  misc_feature 1..20: note = Targeting domain
  source 1..20: mol_type = other RNA
actgaatcggaacaaggcaa

SEQ ID NO: 332 - RNA, 20 nt, synthetic construct
  misc_feature 1..20: note = Targeting domain
  source 1..20: mol_type = other RNA
cattgagatagtgtggggaa

SEQ ID NO: 333 - RNA, 20 nt, synthetic construct
  misc_feature 1..20: note = Targeting domain
  source 1..20: mol_type = other RNA
cttgaccaatagccttgaca

SEQ ID NO: 334 - RNA, 20 nt, synthetic construct
  misc_feature 1..20: note = Targeting domain
  source 1..20: mol_type = other RNA
aggcaaggctggccaaccca

SEQ ID NO: 335 - RNA, 20 nt, synthetic construct
  misc_feature 1..20: note = Targeting domain
  source 1..20: mol_type = other RNA
ccctggctaaactccaccca

SEQ ID NO: 336 - RNA, 20 nt, synthetic construct
  misc_feature 1..20: note = Targeting domain
  source 1..20: mol_type = other RNA
ccatgggtggagtttagcca

SEQ ID NO: 337 - RNA, 20 nt, synthetic construct
  misc_feature 1..20: note = Targeting domain
  source 1..20: mol_type = other RNA
tagagtatccagtgaggcca

SEQ ID NO: 338 - RNA, 20 nt, synthetic construct
  misc_feature 1..20: note = Targeting domain
  source 1..20: mol_type = other RNA
caaggctattggtcaaggca

SEQ ID NO: 339 - RNA, 20 nt, synthetic construct
  misc_feature 1..20: note = Targeting domain
  source 1..20: mol_type = other RNA
cttgtcaaggctattggtca

SEQ ID NO: 340 - RNA, 20 nt, synthetic construct
  misc_feature 1..20: note = Targeting domain
  source 1..20: mol_type = other RNA
tggtcaagtttgccttgtca

SEQ ID NO: 341 - RNA, 20 nt, synthetic construct
  misc_feature 1..20: note = Targeting domain
  source 1..20: mol_type = other RNA
cgagtgtgtggaactgctga

SEQ ID NO: 342 - RNA, 20 nt, synthetic construct
  misc_feature 1..20: note = Targeting domain
  source 1..20: mol_type = other RNA
caggggccggcggctggcta

SEQ ID NO: 343 - RNA, 20 nt, synthetic construct
  misc_feature 1..20: note = Targeting domain
  source 1..20: mol_type = other RNA
agaataaattagagaaaaac

SEQ ID NO: 344 - RNA, 20 nt, synthetic construct
  misc_feature 1..20: note = Targeting domain
  source 1..20: mol_type = other RNA
ccgccggcccctggcctcac

SEQ ID NO: 345 - RNA, 20 nt, synthetic construct
  misc_feature 1..20: note = Targeting domain
  source 1..20: mol_type = other RNA
cctagccagccgccggcccc

SEQ ID NO: 346 - RNA, 20 nt, synthetic construct
  misc_feature 1..20: note = Targeting domain
  source 1..20: mol_type = other RNA
tatctgtctgaaacggtccc

SEQ ID NO: 347 - RNA, 20 nt, synthetic construct
  misc_feature 1..20: note = Targeting domain
  source 1..20: mol_type = other RNA
cccatgggtggagtttagcc

SEQ ID NO: 348 - RNA, 20 nt, synthetic construct
  misc_feature 1..20: note = Targeting domain
  source 1..20: mol_type = other RNA
ttagagtatccagtgaggcc

SEQ ID NO: 349 - RNA, 20 nt, synthetic construct
  misc_feature 1..20: note = Targeting domain
  source 1..20: mol_type = other RNA
acggctgacaaaagaagtcc

SEQ ID NO: 350 - RNA, 20 nt, synthetic construct
  misc_feature 1..20: note = Targeting domain
  source 1..20: mol_type = other RNA
cttcatccctagccagccgc

SEQ ID NO: 351 - RNA, 20 nt, synthetic construct
  misc_feature 1..20: note = Targeting domain
  source 1..20: mol_type = other RNA
tgaggccaggggccggcggc

SEQ ID NO: 352 - RNA, 20 nt, synthetic construct
  misc_feature 1..20: note = Targeting domain
  source 1..20: mol_type = other RNA
tatccagtgaggccaggggc

SEQ ID NO: 353 - RNA, 20 nt, synthetic construct
  misc_feature 1..20: note = Targeting domain
  source 1..20: mol_type = other RNA
cagttccacacactcgcttc

SEQ ID NO: 354 - RNA, 20 nt, synthetic construct
  misc_feature 1..20: note = Targeting domain
  source 1..20: mol_type = other RNA
attgagatagtgtggggaag

SEQ ID NO: 355 - RNA, 20 nt, synthetic construct
  misc_feature 1..20: note = Targeting domain
  source 1..20: mol_type = other RNA
agagtatccagtgaggccag

SEQ ID NO: 356 - RNA, 20 nt, synthetic construct
  misc_feature 1..20: note = Targeting domain
  source 1..20: mol_type = other RNA
ccagtgaggccaggggccgg

SEQ ID NO: 357 - RNA, 20 nt, synthetic construct
  misc_feature 1..20: note = Targeting domain
  source 1..20: mol_type = other RNA
aaggctggccaacccatggg

SEQ ID NO: 358 - RNA, 20 nt, synthetic construct
  misc_feature 1..20: note = Targeting domain
  source 1..20: mol_type = other RNA
actcgcttctggaacgtctg

SEQ ID NO: 359 - RNA, 20 nt, synthetic construct
  misc_feature 1..20: note = Targeting domain
  source 1..20: mol_type = other RNA
tagtcttagagtatccagtg

SEQ ID NO: 360 - RNA, 20 nt, synthetic construct
  misc_feature 1..20: note = Targeting domain
  source 1..20: mol_type = other RNA
atatttgcattgagatagtg

SEQ ID NO: 361 - RNA, 20 nt, synthetic construct
  misc_feature 1..20: note = Targeting domain
  source 1..20: mol_type = other RNA
acgttccagaagcgagtgtg

SEQ ID NO: 362 - RNA, 20 nt, synthetic construct
  misc_feature 1..20: note = Targeting domain
  source 1..20: mol_type = other RNA
atttgcattgagatagtgtg

SEQ ID NO: 363 - RNA, 20 nt, synthetic construct
  misc_feature 1..20: note = Targeting domain
  source 1..20: mol_type = other RNA
cctggctaaactccacccat

SEQ ID NO: 364 - RNA, 20 nt, synthetic construct
  misc_feature 1..20: note = Targeting domain
  source 1..20: mol_type = other RNA
actggatactctaagactat

SEQ ID NO: 365 - RNA, 20 nt, synthetic construct
  misc_feature 1..20: note = Targeting domain
  source 1..20: mol_type = other RNA
ccaggggccggcggctggct

SEQ ID NO: 366 - RNA, 20 nt, synthetic construct
  misc_feature 1..20: note = Targeting domain
  source 1..20: mol_type = other RNA
tatttgcattgagatagtgt

SEQ ID NO: 367 - RNA, 19 nt, synthetic construct
  misc_feature 1..19: note = Targeting domain
  source 1..19: mol_type = other RNA
gtttccttctcccatcata

SEQ ID NO: 368 - RNA, 23 nt, synthetic construct
  misc_feature 1..23: note = Targeting domain
  source 1..23: mol_type = other RNA
gctagtttccttctcccatcata

SEQ ID NO: 369 - RNA, 19 nt, synthetic construct
  misc_feature 1..19: note = Targeting domain
  source 1..19: mol_type = other RNA
gaataaattagagaaaaac

SEQ ID NO: 370 - RNA, 22 nt, synthetic construct
  misc_feature 1..22: note = Targeting domain
  source 1..22: mol_type = other RNA
gaagaataaattagagaaaaac

SEQ ID NO: 371 - RNA, 23 nt, synthetic construct
  misc_feature 1..23: note = Targeting domain
  source 1..23: mol_type = other RNA
ggaagaataaattagagaaaaac

SEQ ID NO: 372 - RNA, 24 nt, synthetic construct
  misc_feature 1..24: note = Targeting domain
  source 1..24: mol_type = other RNA
gggaagaataaattagagaaaaac

SEQ ID NO: 373 - RNA, 20 nt, synthetic construct
  misc_feature 1..20: note = Targeting domain
  source 1..20: mol_type = other RNA
gaaggaaactagctaaaggg

SEQ ID NO: 374 - RNA, 22 nt, synthetic construct
  misc_feature 1..22: note = Targeting domain
  source 1..22: mol_type = other RNA
gagaaggaaactagctaaaggg

SEQ ID NO: 375 - RNA, 23 nt, synthetic construct
  misc_feature 1..23: note = Targeting domain
  source 1..23: mol_type = other RNA
ggagaaggaaactagctaaaggg

SEQ ID NO: 376 - RNA, 24 nt, synthetic construct
  misc_feature 1..24: note = Targeting domain
  source 1..24: mol_type = other RNA
gggagaaggaaactagctaaaggg

SEQ ID NO: 377 - RNA, 18 nt, synthetic construct
  misc_feature 1..18: note = Targeting domain
  source 1..18: mol_type = other RNA
tttccttctcccatcata

SEQ ID NO: 378 - RNA, 20 nt, synthetic construct
  misc_feature 1..20: note = Targeting domain
  source 1..20: mol_type = other RNA
agtttccttctcccatcata

SEQ ID NO: 379 - RNA, 21 nt, synthetic construct
  misc_feature 1..21: note = Targeting domain
  source 1..21: mol_type = other RNA
tagtttccttctcccatcata

SEQ ID NO: 380 - RNA, 22 nt, synthetic construct
  misc_feature 1..22: note = Targeting domain
  source 1..22: mol_type = other RNA
ctagtttccttctcccatcata

SEQ ID NO: 381 - RNA, 24 nt, synthetic construct
  misc_feature 1..24: note = Targeting domain
  source 1..24: mol_type = other RNA
agctagtttccttctcccatcata

SEQ ID NO: 382 - RNA, 18 nt, synthetic construct
  misc_feature 1..18: note = Targeting domain
  source 1..18: mol_type = other RNA
agagaaaaactggaatga

SEQ ID NO: 383 - RNA, 19 nt, synthetic construct
  misc_feature 1..19: note = Targeting domain
  source 1..19: mol_type = other RNA
tagagaaaaactggaatga

SEQ ID NO: 384 - RNA, 20 nt, synthetic construct
  misc_feature 1..20: note = Targeting domain
  source 1..20: mol_type = other RNA
ttagagaaaaactggaatga

SEQ ID NO: 385 - RNA, 21 nt, synthetic construct
  misc_feature 1..21: note = Targeting domain
  source 1..21: mol_type = other RNA
attagagaaaaactggaatga

SEQ ID NO: 386 - RNA, 22 nt, synthetic construct
  misc_feature 1..22: note = Targeting domain
  source 1..22: mol_type = other RNA
aattagagaaaaactggaatga

SEQ ID NO: 387 - RNA, 23 nt, synthetic construct
  misc_feature 1..23: note = Targeting domain
  source 1..23: mol_type = other RNA
aaattagagaaaaactggaatga

SEQ ID NO: 388 - RNA, 24 nt, synthetic construct
  misc_feature 1..24: note = Targeting domain
  source 1..24: mol_type = other RNA
taaattagagaaaaactggaatga

SEQ ID NO: 389 - RNA, 18 nt, synthetic construct
  misc_feature 1..18: note = Targeting domain
  source 1..18: mol_type = other RNA
aataaattagagaaaaac

SEQ ID NO: 390 - RNA, 21 nt, synthetic construct
  misc_feature 1..21: note = Targeting domain
  source 1..21: mol_type = other RNA
aagaataaattagagaaaaac

SEQ ID NO: 391 - RNA, 18 nt, synthetic construct
  misc_feature 1..18: note = Targeting domain
  source 1..18: mol_type = other RNA
aggaaactagctaaaggg

SEQ ID NO: 392 - RNA, 19 nt, synthetic construct
  misc_feature 1..19: note = Targeting domain
  source 1..19: mol_type = other RNA
aaggaaactagctaaaggg

SEQ ID NO: 393 - RNA, 21 nt, synthetic construct
  misc_feature 1..21: note = Targeting domain
  source 1..21: mol_type = other RNA
agaaggaaactagctaaaggg

SEQ ID NO: 394 - RNA, 18 nt, synthetic construct
  misc_feature 1..18: note = Targeting domain
  source 1..18: mol_type = other RNA
tggggaaggggcccccaa

SEQ ID NO: 395 - RNA, 19 nt, synthetic construct
  misc_feature 1..19: note = Targeting domain
  source 1..19: mol_type = other RNA
gtggggaaggggcccccaa

SEQ ID NO: 396 - RNA, 20 nt, synthetic construct
  misc_feature 1..20: note = Targeting domain
  source 1..20: mol_type = other RNA
tgtggggaaggggcccccaa

SEQ ID NO: 397 - RNA, 21 nt, synthetic construct
  misc_feature 1..21: note = Targeting domain
  source 1..21: mol_type = other RNA
gtgtggggaaggggcccccaa

SEQ ID NO: 398 - RNA, 22 nt, synthetic construct
  misc_feature 1..22: note = Targeting domain
  source 1..22: mol_type = other RNA
agtgtggggaaggggcccccaa

SEQ ID NO: 399 - RNA, 23 nt, synthetic construct
  misc_feature 1..23: note = Targeting domain
  source 1..23: mol_type = other RNA
tagtgtggggaaggggcccccaa

SEQ ID NO: 400 - RNA, 24 nt, synthetic construct
  misc_feature 1..24: note = Targeting domain
  source 1..24: mol_type = other RNA
atagtgtggggaaggggcccccaa

SEQ ID NO: 401 - RNA, 18 nt, synthetic construct
  misc_feature 1..18: note = Targeting domain
  source 1..18: mol_type = other RNA
acctcagacgttccagaa

SEQ ID NO: 402 - RNA, 19 nt, synthetic construct
  misc_feature 1..19: note = Targeting domain
  source 1..19: mol_type = other RNA
aacctcagacgttccagaa

SEQ ID NO: 403 - RNA, 20 nt, synthetic construct
  misc_feature 1..20: note = Targeting domain
  source 1..20: mol_type = other RNA
taacctcagacgttccagaa

SEQ ID NO: 404 - RNA, 21 nt, synthetic construct
  misc_feature 1..21: note = Targeting domain
  source 1..21: mol_type = other RNA
ataacctcagacgttccagaa

SEQ ID NO: 405 - RNA, 22 nt, synthetic construct
  misc_feature 1..22: note = Targeting domain
  source 1..22: mol_type = other RNA
gataacctcagacgttccagaa

SEQ ID NO: 406 - RNA, 23 nt, synthetic construct
  misc_feature 1..23: note = Targeting domain
  source 1..23: mol_type = other RNA
tgataacctcagacgttccagaa

SEQ ID NO: 407 - RNA, 24 nt, synthetic construct
  misc_feature 1..24: note = Targeting domain
  source 1..24: mol_type = other RNA
ttgataacctcagacgttccagaa

SEQ ID NO: 408 - RNA, 18 nt, synthetic construct
  misc_feature 1..18: note = Targeting domain
  source 1..18: mol_type = other RNA
cgccggcccctggcctca

SEQ ID NO: 409 - RNA, 19 nt, synthetic construct
  misc_feature 1..19: note = Targeting domain
  source 1..19: mol_type = other RNA
ccgccggcccctggcctca

SEQ ID NO: 410 - RNA, 20 nt, synthetic construct
  misc_feature 1..20: note = Targeting domain
  source 1..20: mol_type = other RNA
gccgccggcccctggcctca

SEQ ID NO: 411 - RNA, 21 nt, synthetic construct
  misc_feature 1..21: note = Targeting domain
  source 1..21: mol_type = other RNA
agccgccggcccctggcctca

SEQ ID NO: 412 - RNA, 22 nt, synthetic construct
  misc_feature 1..22: note = Targeting domain
  source 1..22: mol_type = other RNA
cagccgccggcccctggcctca

SEQ ID NO: 413 - RNA, 23 nt, synthetic construct
  misc_feature 1..23: note = Targeting domain
  source 1..23: mol_type = other RNA
ccagccgccggcccctggcctca

SEQ ID NO: 414 - RNA, 24 nt, synthetic construct
  misc_feature 1..24: note = Targeting domain
  source 1..24: mol_type = other RNA
gccagccgccggcccctggcctca

SEQ ID NO: 415 - RNA, 18 nt, synthetic construct
  misc_feature 1..18: note = Targeting domain
  source 1..18: mol_type = other RNA
ggcaaggctggccaaccc

SEQ ID NO: 416 - RNA, 19 nt, synthetic construct
  misc_feature 1..19: note = Targeting domain
  source 1..19: mol_type = other RNA
aggcaaggctggccaaccc

SEQ ID NO: 417 - RNA, 20 nt, synthetic construct
  misc_feature 1..20: note = Targeting domain
  source 1..20: mol_type = other RNA
aaggcaaggctggccaaccc

SEQ ID NO: 418 - RNA, 21 nt, synthetic construct
  misc_feature 1..21: note = Targeting domain
  source 1..21: mol_type = other RNA
caaggcaaggctggccaaccc

SEQ ID NO: 419 - RNA, 22 nt, synthetic construct
  misc_feature 1..22: note = Targeting domain
  source 1..22: mol_type = other RNA
tcaaggcaaggctggccaaccc

SEQ ID NO: 420 - RNA, 23 nt, synthetic construct
  misc_feature 1..23: note = Targeting domain
  source 1..23: mol_type = other RNA
gtcaaggcaaggctggccaaccc

SEQ ID NO: 421 - RNA, 24 nt, synthetic construct
  misc_feature 1..24: note = Targeting domain
  source 1..24: mol_type = other RNA
ggtcaaggcaaggctggccaaccc

SEQ ID NO: 422 - RNA, 18 nt, synthetic construct
  misc_feature 1..18: note = Targeting domain
  source 1..18: mol_type = other RNA
ggctggccaacccatggg

SEQ ID NO: 423 - RNA, 19 nt, synthetic construct
  misc_feature 1..19: note = Targeting domain
  source 1..19: mol_type = other RNA
aggctggccaacccatggg

SEQ ID NO: 424 - RNA, 21 nt, synthetic construct
  misc_feature 1..21: note = Targeting domain
  source 1..21: mol_type = other RNA
caaggctggccaacccatggg

SEQ ID NO: 425 - RNA, 22 nt, synthetic construct
  misc_feature 1..22: note = Targeting domain
  source 1..22: mol_type = other RNA
gcaaggctggccaacccatggg

SEQ ID NO: 426 - RNA, 23 nt, synthetic construct
  misc_feature 1..23: note = Targeting domain
  source 1..23: mol_type = other RNA
ggcaaggctggccaacccatggg

SEQ ID NO: 427 - RNA, 24 nt, synthetic construct
  misc_feature 1..24: note = Targeting domain
  source 1..24: mol_type = other RNA
aggcaaggctggccaacccatggg

SEQ ID NO: 428 - RNA, 18 nt, synthetic construct
  misc_feature 1..18: note = Targeting domain
  source 1..18: mol_type = other RNA
gagtgtgtggaactgctg

SEQ ID NO: 429 - RNA, 19 nt, synthetic construct
  misc_feature 1..19: note = Targeting domain
  source 1..19: mol_type = other RNA
cgagtgtgtggaactgctg

SEQ ID NO: 430 - RNA, 20 nt, synthetic construct
  misc_feature 1..20: note = Targeting domain
  source 1..20: mol_type = other RNA
gcgagtgtgtggaactgctg

SEQ ID NO: 431 - RNA, 21 nt, synthetic construct
  misc_feature 1..21: note = Targeting domain
  source 1..21: mol_type = other RNA
agcgagtgtgtggaactgctg

SEQ ID NO: 432 - RNA, 22 nt, synthetic construct
  misc_feature 1..22: note = Targeting domain
  source 1..22: mol_type = other RNA
aagcgagtgtgtggaactgctg

SEQ ID NO: 433 - RNA, 23 nt, synthetic construct
  misc_feature 1..23: note = Targeting domain
  source 1..23: mol_type = other RNA
gaagcgagtgtgtggaactgctg

SEQ ID NO: 434 - RNA, 24 nt, synthetic construct
  misc_feature 1..24: note = Targeting domain
  source 1..24: mol_type = other RNA
agaagcgagtgtgtggaactgctg

SEQ ID NO: 435 - RNA, 18 nt, synthetic construct
  misc_feature 1..18: note = Targeting domain
  source 1..18: mol_type = other RNA
cctggctaaactccaccc

SEQ ID NO: 436 - RNA, 19 nt, synthetic construct
  misc_feature 1..19: note = Targeting domain
  source 1..19: mol_type = other RNA
ccctggctaaactccaccc

SEQ ID NO: 437 - RNA, 20 nt, synthetic construct
  misc_feature 1..20: note = Targeting domain
  source 1..20: mol_type = other RNA
tccctggctaaactccaccc

SEQ ID NO: 438 - RNA, 21 nt, synthetic construct
  misc_feature 1..21: note = Targeting domain
  source 1..21: mol_type = other RNA
gtccctggctaaactccaccc

SEQ ID NO: 439 - RNA, 22 nt, synthetic construct
  misc_feature 1..22: note = Targeting domain
  source 1..22: mol_type = other RNA
ggtccctggctaaactccaccc

SEQ ID NO: 440 - RNA, 23 nt, synthetic construct
  misc_feature 1..23: note = Targeting domain
  source 1..23: mol_type = other RNA
cggtccctggctaaactccaccc

SEQ ID NO: 441 - RNA, 24 nt, synthetic construct
  misc_feature 1..24: note = Targeting domain
  source 1..24: mol_type = other RNA
acggtccctggctaaactccaccc

SEQ ID NO: 442 - RNA, 18 nt, synthetic construct
  misc_feature 1..18: note = Targeting domain
  source 1..18: mol_type = other RNA
ggcggctggctagggatg

SEQ ID NO: 443 - RNA, 19 nt, synthetic construct
  misc_feature 1..19: note = Targeting domain
  source 1..19: mol_type = other RNA
cggcggctggctagggatg

SEQ ID NO: 444 - RNA, 20 nt, synthetic construct
  misc_feature 1..20: note = Targeting domain
  source 1..20: mol_type = other RNA
ccggcggctggctagggatg

SEQ ID NO: 445 - RNA, 21 nt, synthetic construct
  misc_feature 1..21: note = Targeting domain
  source 1..21: mol_type = other RNA
gccggcggctggctagggatg

SEQ ID NO: 446 - RNA, 22 nt, synthetic construct
  misc_feature 1..22: note = Targeting domain
  source 1..22: mol_type = other RNA
ggccggcggctggctagggatg

SEQ ID NO: 447 - RNA, 23 nt, synthetic construct
  misc_feature 1..23: note = Targeting domain
  source 1..23: mol_type = other RNA
gggccggcggctggctagggatg

SEQ ID NO: 448 - RNA, 24 nt, synthetic construct
  misc_feature 1..24: note = Targeting domain
  source 1..24: mol_type = other RNA
ggggccggcggctggctagggatg

SEQ ID NO: 449 - RNA, 18 nt, synthetic construct
  misc_feature 1..18: note = Targeting domain
  source 1..18: mol_type = other RNA
aggggccggcggctggct

SEQ ID NO: 450 - RNA, 19 nt, synthetic construct
  misc_feature 1..19: note = Targeting domain
  source 1..19: mol_type = other RNA
caggggccggcggctggct

SEQ ID NO: 451 - RNA, 21 nt, synthetic construct
  misc_feature 1..21: note = Targeting domain
  source 1..21: mol_type = other RNA
gccaggggccggcggctggct

SEQ ID NO: 452 - RNA, 22 nt, synthetic construct
  misc_feature 1..22: note = Targeting domain
  source 1..22: mol_type = other RNA
ggccaggggccggcggctggct

SEQ ID NO: 453 - RNA, 23 nt, synthetic construct
  misc_feature 1..23: note = Targeting domain
  source 1..23: mol_type = other RNA
aggccaggggccggcggctggct

SEQ ID NO: 454 - RNA, 24 nt, synthetic construct
  misc_feature 1..24: note = Targeting domain
  source 1..24: mol_type = other RNA
gaggccaggggccggcggctggct

SEQ ID NO: 455 - RNA, 18 nt, synthetic construct
  misc_feature 1..18: note = Targeting domain
  source 1..18: mol_type = other RNA
aaacttgaccaatagtct

SEQ ID NO: 456 - RNA, 19 nt, synthetic construct
  misc_feature 1..19: note = Targeting domain
  source 1..19: mol_type = other RNA
caaacttgaccaatagtct

SEQ ID NO: 457 - RNA, 20 nt, synthetic construct
  misc_feature 1..20: note = Targeting domain
  source 1..20: mol_type = other RNA
gcaaacttgaccaatagtct

SEQ ID NO: 458 - RNA, 21 nt, synthetic construct
  misc_feature 1..21: note = Targeting domain
  source 1..21: mol_type = other RNA
ggcaaacttgaccaatagtct

SEQ ID NO: 459 - RNA, 22 nt, synthetic construct
  misc_feature 1..22: note = Targeting domain
  source 1..22: mol_type = other RNA
aggcaaacttgaccaatagtct

SEQ ID NO: 460 - RNA, 23 nt, synthetic construct
  misc_feature 1..23: note = Targeting domain
  source 1..23: mol_type = other RNA
aaggcaaacttgaccaatagtct

SEQ ID NO: 461 - RNA, 24 nt, synthetic construct
  misc_feature 1..24: note = Targeting domain
  source 1..24: mol_type = other RNA
caaggcaaacttgaccaatagtct

SEQ ID NO: 462 - RNA, 18 nt, synthetic construct
  misc_feature 1..18: note = Targeting domain
  source 1..18: mol_type = other RNA
ttcagacagatatttgca

SEQ ID NO: 463 - RNA, 19 nt, synthetic construct
  misc_feature 1..19: note = Targeting domain
  source 1..19: mol_type = other RNA
tttcagacagatatttgca

SEQ ID NO: 464 - RNA, 20 nt, synthetic construct
  misc_feature 1..20: note = Targeting domain
  source 1..20: mol_type = other RNA
gtttcagacagatatttgca

SEQ ID NO: 465 - RNA, 21 nt, synthetic construct
  misc_feature 1..21: note = Targeting domain
  source 1..21: mol_type = other RNA
cgtttcagacagatatttgca

SEQ ID NO: 466 - RNA, 22 nt, synthetic construct
  misc_feature 1..22: note = Targeting domain
  source 1..22: mol_type = other RNA
ccgtttcagacagatatttgca

SEQ ID NO: 467 - RNA, 23 nt, synthetic construct
  misc_feature 1..23: note = Targeting domain
  source 1..23: mol_type = other RNA
accgtttcagacagatatttgca

SEQ ID NO: 468 - RNA, 24 nt, synthetic construct
  misc_feature 1..24: note = Targeting domain
  source 1..24: mol_type = other RNA
gaccgtttcagacagatatttgca

SEQ ID NO: 469 - RNA, 18 nt, synthetic construct
  misc_feature 1..18: note = Targeting domain
  source 1..18: mol_type = other RNA
agtttccttctcccatca

SEQ ID NO: 470 - RNA, 19 nt, synthetic construct
  misc_feature 1..19: note = Targeting domain
  source 1..19: mol_type = other RNA
tagtttccttctcccatca

SEQ ID NO: 471 - RNA, 20 nt, synthetic construct
  misc_feature 1..20: note = Targeting domain
  source 1..20: mol_type = other RNA
ctagtttccttctcccatca

SEQ ID NO: 472 - RNA, 21 nt, synthetic construct
  misc_feature 1..21: note = Targeting domain
  source 1..21: mol_type = other RNA
gctagtttccttctcccatca

SEQ ID NO: 473 - RNA, 22 nt, synthetic construct
  misc_feature 1..22: note = Targeting domain
  source 1..22: mol_type = other RNA
agctagtttccttctcccatca

SEQ ID NO: 474 - RNA, 23 nt, synthetic construct
  misc_feature 1..23: note = Targeting domain
  source 1..23: mol_type = other RNA
tagctagtttccttctcccatca

SEQ ID NO: 475 - RNA, 24 nt, synthetic construct
  misc_feature 1..24: note = Targeting domain
  source 1..24: mol_type = other RNA
ttagctagtttccttctcccatca

SEQ ID NO: 476 - RNA, 18 nt, synthetic construct
  misc_feature 1..18: note = Targeting domain
  source 1..18: mol_type = other RNA
attgagatagtgtgggga

SEQ ID NO: 477 - RNA, 19 nt, synthetic construct
  misc_feature 1..19: note = Targeting domain
  source 1..19: mol_type = other RNA
cattgagatagtgtgggga

SEQ ID NO: 478 - RNA, 21 nt, synthetic construct
  misc_feature 1..21: note = Targeting domain
  source 1..21: mol_type = other RNA
tgcattgagatagtgtgggga

SEQ ID NO: 479 - RNA, 22 nt, synthetic construct
  misc_feature 1..22: note = Targeting domain
  source 1..22: mol_type = other RNA
ttgcattgagatagtgtgggga

SEQ ID NO: 480 - RNA, 23 nt, synthetic construct
  misc_feature 1..23: note = Targeting domain
  source 1..23: mol_type = other RNA
tttgcattgagatagtgtgggga

SEQ ID NO: 481 - RNA, 24 nt, synthetic construct
  misc_feature 1..24: note = Targeting domain
  source 1..24: mol_type = other RNA
atttgcattgagatagtgtgggga

SEQ ID NO: 482 - RNA, 18 nt, synthetic construct
  misc_feature 1..18: note = Targeting domain
  source 1..18: mol_type = other RNA
tcccatcatagaggatac

SEQ ID NO: 483 - RNA, 19 nt, synthetic construct
  misc_feature 1..19: note = Targeting domain
  source 1..19: mol_type = other RNA
ctcccatcatagaggatac

SEQ ID NO: 484 - RNA, 20 nt, synthetic construct
  misc_feature 1..20: note = Targeting domain
  source 1..20: mol_type = other RNA
tctcccatcatagaggatac

SEQ ID NO: 485 - RNA, 21 nt, synthetic construct
  misc_feature 1..21: note = Targeting domain
  source 1..21: mol_type = other RNA
ttctcccatcatagaggatac

SEQ ID NO: 486 - RNA, 22 nt, synthetic construct
  misc_feature 1..22: note = Targeting domain
  source 1..22: mol_type = other RNA
cttctcccatcatagaggatac

SEQ ID NO: 487 - RNA, 23 nt, synthetic construct
  misc_feature 1..23: note = Targeting domain
  source 1..23: mol_type = other RNA
ccttctcccatcatagaggatac

SEQ ID NO: 488 - RNA, 24 nt, synthetic construct
  misc_feature 1..24: note = Targeting domain
  source 1..24: mol_type = other RNA
tccttctcccatcatagaggatac

SEQ ID NO: 489 - RNA, 18 nt, synthetic construct
  misc_feature 1..18: note = Targeting domain
  source 1..18: mol_type = other RNA
tgtggggaaggggccccc

SEQ ID NO: 490 - RNA, 19 nt, synthetic construct
  misc_feature 1..19: note = Targeting domain
  source 1..19: mol_type = other RNA
gtgtggggaaggggccccc

SEQ ID NO: 491 - RNA, 20 nt, synthetic construct
  misc_feature 1..20: note = Targeting domain
  source 1..20: mol_type = other RNA
agtgtggggaaggggccccc

SEQ ID NO: 492 - RNA, 21 nt, synthetic construct
  misc_feature 1..21: note = Targeting domain
  source 1..21: mol_type = other RNA
tagtgtggggaaggggccccc

SEQ ID NO: 493 - RNA, 22 nt, synthetic construct
  misc_feature 1..22: note = Targeting domain
  source 1..22: mol_type = other RNA
atagtgtggggaaggggccccc

SEQ ID NO: 494 - RNA, 23 nt, synthetic construct
  misc_feature 1..23: note = Targeting domain
  source 1..23: mol_type = other RNA
gatagtgtggggaaggggccccc

SEQ ID NO: 495 - RNA, 24 nt, synthetic construct
  misc_feature 1..24: note = Targeting domain
  source 1..24: mol_type = other RNA
agatagtgtggggaaggggccccc

SEQ ID NO: 496 - RNA, 18 nt, synthetic construct
  misc_feature 1..18: note = Targeting domain
  source 1..18: mol_type = other RNA
catgggtggagtttagcc

SEQ ID NO: 497 - RNA, 19 nt, synthetic construct
  misc_feature 1..19: note = Targeting domain
  source 1..19: mol_type = other RNA
ccatgggtggagtttagcc

SEQ ID NO: 498 - RNA, 21 nt, synthetic construct
  misc_feature 1..21: note = Targeting domain
  source 1..21: mol_type = other RNA
acccatgggtggagtttagcc

SEQ ID NO: 499 - RNA, 22 nt, synthetic construct
  misc_feature 1..22: note = Targeting domain
  source 1..22: mol_type = other RNA
aacccatgggtggagtttagcc

SEQ ID NO: 500 - RNA, 23 nt, synthetic construct
  misc_feature 1..23: note = Targeting domain
  source 1..23: mol_type = other RNA
caacccatgggtggagtttagcc

SEQ ID NO: 501 - RNA, 24 nt, synthetic construct
  misc_feature 1..24: note = Targeting domain
  source 1..24: mol_type = other RNA
ccaacccatgggtggagtttagcc

SEQ ID NO: 502 - RNA, 18 nt, synthetic construct
  misc_feature 1..18: note = Targeting domain
  source 1..18: mol_type = other RNA
ccatgggtggagtttagc

SEQ ID NO: 503 - RNA, 19 nt, synthetic construct
  misc_feature 1..19: note = Targeting domain
  source 1..19: mol_type = other RNA
cccatgggtggagtttagc

SEQ ID NO: 504 - RNA, 20 nt, synthetic construct
  misc_feature 1..20: note = Targeting domain
  source 1..20: mol_type = other RNA
acccatgggtggagtttagc

SEQ ID NO: 505 - RNA, 21 nt, synthetic construct
  misc_feature 1..21: note = Targeting domain
  source 1..21: mol_type = other RNA
aacccatgggtggagtttagc

SEQ ID NO: 506 - RNA, 22 nt, synthetic construct
  misc_feature 1..22: note = Targeting domain
  source 1..22: mol_type = other RNA
caacccatgggtggagtttagc

SEQ ID NO: 507 - RNA, 23 nt, synthetic construct
  misc_feature 1..23: note = Targeting domain
  source 1..23: mol_type = other RNA
ccaacccatgggtggagtttagc

SEQ ID NO: 508 - RNA, 24 nt, synthetic construct
  misc_feature 1..24: note = Targeting domain
  source 1..24: mol_type = other RNA
gccaacccatgggtggagtttagc

SEQ ID NO: 509 - RNA, 18 nt, synthetic construct
  misc_feature 1..18: note = Targeting domain
  source 1..18: mol_type = other RNA
tgataacctcagacgttc

SEQ ID NO: 510 - RNA, 19 nt, synthetic construct
  misc_feature 1..19: note = Targeting domain
  source 1..19: mol_type = other RNA
ttgataacctcagacgttc

SEQ ID NO: 511 - RNA, 20 nt, synthetic construct
  misc_feature 1..20: note = Targeting domain
  source 1..20: mol_type = other RNA
attgataacctcagacgttc

SEQ ID NO: 512 - RNA, 21 nt, synthetic construct
  misc_feature 1..21: note = Targeting domain
  source 1..21: mol_type = other RNA
tattgataacctcagacgttc

SEQ ID NO: 513 - RNA, 22 nt, synthetic construct
  misc_feature 1..22: note = Targeting domain
  source 1..22: mol_type = other RNA
ttattgataacctcagacgttc

SEQ ID NO: 514 - RNA, 23 nt, synthetic construct
  misc_feature 1..23: note = Targeting domain
  source 1..23: mol_type = other RNA
cttattgataacctcagacgttc

SEQ ID NO: 515 - RNA, 24 nt, synthetic construct
  misc_feature 1..24: note = Targeting domain
  source 1..24: mol_type = other RNA
gcttattgataacctcagacgttc

SEQ ID NO: 516 - RNA, 18 nt, synthetic construct
  misc_feature 1..18: note = Targeting domain
  source 1..18: mol_type = other RNA
cattgagatagtgtgggg

SEQ ID NO: 517 - RNA, 19 nt, synthetic construct
  misc_feature 1..19: note = Targeting domain
  source 1..19: mol_type = other RNA
gcattgagatagtgtgggg

SEQ ID NO: 518 - RNA, 20 nt, synthetic construct
  misc_feature 1..20: note = Targeting domain
  source 1..20: mol_type = other RNA
tgcattgagatagtgtgggg

SEQ ID NO: 519 - RNA, 21 nt, synthetic construct
  misc_feature 1..21: note = Targeting domain
  source 1..21: mol_type = other RNA
ttgcattgagatagtgtgggg

SEQ ID NO: 520 - RNA, 22 nt, synthetic construct
  misc_feature 1..22: note = Targeting domain
  source 1..22: mol_type = other RNA
tttgcattgagatagtgtgggg

SEQ ID NO: 521 - RNA, 23 nt, synthetic construct
  misc_feature 1..23: note = Targeting domain
  source 1..23: mol_type = other RNA
atttgcattgagatagtgtgggg

SEQ ID NO: 522 - RNA, 24 nt, synthetic construct
  misc_feature 1..24: note = Targeting domain
  source 1..24: mol_type = other RNA
tatttgcattgagatagtgtgggg

SEQ ID NO: 523 - RNA, 18 nt, synthetic construct
  misc_feature 1..18: note = Targeting domain
  source 1..18: mol_type = other RNA
aggctggccaacccatgg

SEQ ID NO: 524 - RNA, 19 nt, synthetic construct
  misc_feature 1..19: note = Targeting domain
  source 1..19: mol_type = other RNA
aaggctggccaacccatgg

SEQ ID NO: 525 - RNA, 20 nt, synthetic construct
  misc_feature 1..20: note = Targeting domain
  source 1..20: mol_type = other RNA
caaggctggccaacccatgg

SEQ ID NO: 526 - RNA, 21 nt, synthetic construct
  misc_feature 1..21: note = Targeting domain
  source 1..21: mol_type = other RNA
gcaaggctggccaacccatgg

SEQ ID NO: 527 - RNA, 22 nt, synthetic construct
  misc_feature 1..22: note = Targeting domain
  source 1..22: mol_type = other RNA
ggcaaggctggccaacccatgg

SEQ ID NO: 528 - RNA, 23 nt, synthetic construct
  misc_feature 1..23: note = Targeting domain
  source 1..23: mol_type = other RNA
aggcaaggctggccaacccatgg

SEQ ID NO: 529 - RNA, 24 nt, synthetic construct
  misc_feature 1..24: note = Targeting domain
  source 1..24: mol_type = other RNA
aaggcaaggctggccaacccatgg

SEQ ID NO: 530 - RNA, 18 nt, synthetic construct
  misc_feature 1..18: note = Targeting domain
  source 1..18: mol_type = other RNA
agcgagtgtgtggaactg

SEQ ID NO: 531 - RNA, 19 nt, synthetic construct
  misc_feature 1..19: note = Targeting domain
  source 1..19: mol_type = other RNA
aagcgagtgtgtggaactg

SEQ ID NO: 532 - RNA, 20 nt, synthetic construct
  misc_feature 1..20: note = Targeting domain
  source 1..20: mol_type = other RNA
gaagcgagtgtgtggaactg

SEQ ID NO: 533 - RNA, 21 nt, synthetic construct
  misc_feature 1..21: note = Targeting domain
  source 1..21: mol_type = other RNA
agaagcgagtgtgtggaactg

SEQ ID NO: 534 - RNA, 22 nt, synthetic construct
  misc_feature 1..22: note = Targeting domain
  source 1..22: mol_type = other RNA
cagaagcgagtgtgtggaactg

SEQ ID NO: 535 - RNA, 23 nt, synthetic construct
  misc_feature 1..23: note = Targeting domain
  source 1..23: mol_type = other RNA
ccagaagcgagtgtgtggaactg

SEQ ID NO: 536 - RNA, 24 nt, synthetic construct
  misc_feature 1..24: note = Targeting domain
  source 1..24: mol_type = other RNA
tccagaagcgagtgtgtggaactg

SEQ ID NO: 537 - RNA, 18 nt, synthetic construct
  misc_feature 1..18: note = Targeting domain
  source 1..18: mol_type = other RNA
atttgcattgagatagtg

SEQ ID NO: 538 - RNA, 19 nt, synthetic construct
  misc_feature 1..19: note = Targeting domain
  source 1..19: mol_type = other RNA
tatttgcattgagatagtg

SEQ ID NO: 539 - RNA, 21 nt, synthetic construct
  misc_feature 1..21: note = Targeting domain
  source 1..21: mol_type = other RNA
gatatttgcattgagatagtg

SEQ ID NO: 540 - RNA, 22 nt, synthetic construct
  misc_feature 1..22: note = Targeting domain
  source 1..22: mol_type = other RNA
agatatttgcattgagatagtg

SEQ ID NO: 541 - RNA, 23 nt, synthetic construct
  misc_feature 1..23: note = Targeting domain
  source 1..23: mol_type = other RNA
cagatatttgcattgagatagtg

SEQ ID NO: 542 - RNA, 24 nt, synthetic construct
  misc_feature 1..24: note = Targeting domain
  source 1..24: mol_type = other RNA
acagatatttgcattgagatagtg

SEQ ID NO: 543 - RNA, 18 nt, synthetic construct
  misc_feature 1..18: note = Targeting domain
  source 1..18: mol_type = other RNA
gttccagaagcgagtgtg

SEQ ID NO: 544 - RNA, 19 nt, synthetic construct
  misc_feature 1..19: note = Targeting domain
  source 1..19: mol_type = other RNA
cgttccagaagcgagtgtg

SEQ ID NO: 545 - RNA, 21 nt, synthetic construct
  misc_feature 1..21: note = Targeting domain
  source 1..21: mol_type = other RNA
gacgttccagaagcgagtgtg

SEQ ID NO: 546 - RNA, 22 nt, synthetic construct
  misc_feature 1..22: note = Targeting domain
  source 1..22: mol_type = other RNA
agacgttccagaagcgagtgtg

SEQ ID NO: 547 - RNA, 23 nt, synthetic construct
  misc_feature 1..23: note = Targeting domain
  source 1..23: mol_type = other RNA
cagacgttccagaagcgagtgtg

SEQ ID NO: 548 - RNA, 24 nt, synthetic construct
  misc_feature 1..24: note = Targeting domain
  source 1..24: mol_type = other RNA
tcagacgttccagaagcgagtgtg

SEQ ID NO: 549 - RNA, 18 nt, synthetic construct
  misc_feature 1..18: note = Targeting domain
  source 1..18: mol_type = other RNA
ttgcattgagatagtgtg

SEQ ID NO: 550 - RNA, 19 nt, synthetic construct
  misc_feature 1..19: note = Targeting domain
  source 1..19: mol_type = other RNA
tttgcattgagatagtgtg

SEQ ID NO: 551 - RNA, 21 nt, synthetic construct
  misc_feature 1..21: note = Targeting domain
  source 1..21: mol_type = other RNA
tatttgcattgagatagtgtg

SEQ ID NO: 552 - RNA, 22 nt, synthetic construct
  misc_feature 1..22: note = Targeting domain
  source 1..22: mol_type = other RNA
atatttgcattgagatagtgtg

SEQ ID NO: 553 - RNA, 23 nt, synthetic construct
  misc_feature 1..23: note = Targeting domain
  source 1..23: mol_type = other RNA
gatatttgcattgagatagtgtg

SEQ ID NO: 554 - RNA, 24 nt, synthetic construct
  misc_feature 1..24: note = Targeting domain
  source 1..24: mol_type = other RNA
agatatttgcattgagatagtgtg

SEQ ID NO: 555 - RNA, 18 nt, synthetic construct
  misc_feature 1..18: note = Targeting domain
  source 1..18: mol_type = other RNA
tatttgcattgagatagt

SEQ ID NO: 556 - RNA, 19 nt, synthetic construct
  misc_feature 1..19: note = Targeting domain
  source 1..19: mol_type = other RNA
atatttgcattgagatagt

SEQ ID NO: 557 - RNA, 20 nt, synthetic construct
  misc_feature 1..20: note = Targeting domain
  source 1..20: mol_type = other RNA
gatatttgcattgagatagt

SEQ ID NO: 558 - RNA, 21 nt, synthetic construct
  misc_feature 1..21: note = Targeting domain
  source 1..21: mol_type = other RNA
agatatttgcattgagatagt

SEQ ID NO: 559 - RNA, 22 nt, synthetic construct
  misc_feature 1..22: note = Targeting domain
  source 1..22: mol_type = other RNA
cagatatttgcattgagatagt

SEQ ID NO: 560 - RNA, 23 nt, synthetic construct
  misc_feature 1..23: note = Targeting domain
  source 1..23: mol_type = other RNA
acagatatttgcattgagatagt

SEQ ID NO: 561 - RNA, 24 nt, synthetic construct
  misc_feature 1..24: note = Targeting domain
  source 1..24: mol_type = other RNA
gacagatatttgcattgagatagt

SEQ ID NO: 562 - RNA, 18 nt, synthetic construct
  misc_feature 1..18: note = Targeting domain
  source 1..18: mol_type = other RNA
cgttccagaagcgagtgt

SEQ ID NO: 563 - RNA, 19 nt, synthetic construct
  misc_feature 1..19: note = Targeting domain
  source 1..19: mol_type = other RNA
acgttccagaagcgagtgt

SEQ ID NO: 564 - RNA, 20 nt, synthetic construct
  misc_feature 1..20: note = Targeting domain
  source 1..20: mol_type = other RNA
gacgttccagaagcgagtgt

SEQ ID NO: 565 - RNA, 21 nt, synthetic construct
  misc_feature 1..21: note = Targeting domain
  source 1..21: mol_type = other RNA
agacgttccagaagcgagtgt

SEQ ID NO: 566 - RNA, 22 nt, synthetic construct
  misc_feature 1..22: note = Targeting domain
  source 1..22: mol_type = other RNA
cagacgttccagaagcgagtgt

SEQ ID NO: 567 - RNA, 23 nt, synthetic construct
  misc_feature 1..23: note = Targeting domain
  source 1..23: mol_type = other RNA
tcagacgttccagaagcgagtgt

SEQ ID NO: 568 - RNA, 24 nt, synthetic construct
  misc_feature 1..24: note = Targeting domain
  source 1..24: mol_type = other RNA
ctcagacgttccagaagcgagtgt

SEQ ID NO: 569 - RNA, 18 nt, synthetic construct
  misc_feature 1..18: note = Targeting domain
  source 1..18: mol_type = other RNA
tttgcattgagatagtgt

SEQ ID NO: 570 - RNA, 19 nt, synthetic construct
  misc_feature 1..19: note = Targeting domain
  source 1..19: mol_type = other RNA
atttgcattgagatagtgt

SEQ ID NO: 571 - RNA, 21 nt, synthetic construct
  misc_feature 1..21: note = Targeting domain
  source 1..21: mol_type = other RNA
atatttgcattgagatagtgt

SEQ ID NO: 572 - RNA, 22 nt, synthetic construct
  misc_feature 1..22: note = Targeting domain
  source 1..22: mol_type = other RNA
gatatttgcattgagatagtgt

SEQ ID NO: 573 - RNA, 23 nt, synthetic construct
  misc_feature 1..23: note = Targeting domain
  source 1..23: mol_type = other RNA
agatatttgcattgagatagtgt

SEQ ID NO: 574 - RNA, 24 nt, synthetic construct
  misc_feature 1..24: note = Targeting domain
  source 1..24: mol_type = other RNA
cagatatttgcattgagatagtgt

SEQ ID NO: 575 - RNA, 18 nt, synthetic construct
  misc_feature 1..18: note = Targeting domain
  source 1..18: mol_type = other RNA
gaataaattagagaaaaa

SEQ ID NO: 576 - RNA, 19 nt, synthetic construct
  misc_feature 1..19: note = Targeting domain
  source 1..19: mol_type = other RNA
agaataaattagagaaaaa

SEQ ID NO: 577 - RNA, 20 nt, synthetic construct
  misc_feature 1..20: note = Targeting domain
  source 1..20: mol_type = other RNA
aagaataaattagagaaaaa

SEQ ID NO: 578 - RNA, 21 nt, synthetic construct
  misc_feature 1..21: note = Targeting domain
  source 1..21: mol_type = other RNA
gaagaataaattagagaaaaa

SEQ ID NO: 579 - RNA, 22 nt, synthetic construct
  misc_feature 1..22: note = Targeting domain
  source 1..22: mol_type = other RNA
ggaagaataaattagagaaaaa

SEQ ID NO: 580 - RNA, 23 nt, synthetic construct
  misc_feature 1..23: note = Targeting domain
  source 1..23: mol_type = other RNA
gggaagaataaattagagaaaaa

SEQ ID NO: 581 - RNA, 24 nt, synthetic construct
  misc_feature 1..24: note = Targeting domain
  source 1..24: mol_type = other RNA
agggaagaataaattagagaaaaa

SEQ ID NO: 582 - RNA, 18 nt, synthetic construct
  misc_feature 1..18: note = Targeting domain
  source 1..18: mol_type = other RNA
ctagggatgaagaataaa

SEQ ID NO: 583 - RNA, 19 nt, synthetic construct
  misc_feature 1..19: note = Targeting domain
  source 1..19: mol_type = other RNA
gctagggatgaagaataaa

SEQ ID NO: 584 - RNA, 21 nt, synthetic construct
  misc_feature 1..21: note = Targeting domain
  source 1..21: mol_type = other RNA
tggctagggatgaagaataaa

SEQ ID NO: 585 - RNA, 22 nt, synthetic construct
  misc_feature 1..22: note = Targeting domain
  source 1..22: mol_type = other RNA
ctggctagggatgaagaataaa

SEQ ID NO: 586 - RNA, 23 nt, synthetic construct
  misc_feature 1..23: note = Targeting domain
  source 1..23: mol_type = other RNA
gctggctagggatgaagaataaa

SEQ ID NO: 587 - RNA, 24 nt, synthetic construct
  misc_feature 1..24: note = Targeting domain
  source 1..24: mol_type = other RNA
ggctggctagggatgaagaataaa

SEQ ID NO: 588 - RNA, 18 nt, synthetic construct
  misc_feature 1..18: note = Targeting domain
  source 1..18: mol_type = other RNA
agaaggaaactagctaaa

SEQ ID NO: 589 - RNA, 19 nt, synthetic construct
  misc_feature 1..19: note = Targeting domain
  source 1..19: mol_type = other RNA
gagaaggaaactagctaaa

SEQ ID NO: 590 - RNA, 21 nt, synthetic construct
  misc_feature 1..21: note = Targeting domain
  source 1..21: mol_type = other RNA
gggagaaggaaactagctaaa

SEQ ID NO: 591 - RNA, 22 nt, synthetic construct
  misc_feature 1..22: note = Targeting domain
  source 1..22: mol_type = other RNA
tgggagaaggaaactagctaaa

SEQ ID NO: 592 - RNA, 23 nt, synthetic construct
  misc_feature 1..23: note = Targeting domain
  source 1..23: mol_type = other RNA
atgggagaaggaaactagctaaa

SEQ ID NO: 593 - RNA, 24 nt, synthetic construct
  misc_feature 1..24: note = Targeting domain
  source 1..24: mol_type = other RNA
gatgggagaaggaaactagctaaa

SEQ ID NO: 594 - RNA, 18 nt, synthetic construct
  misc_feature 1..18: note = Targeting domain
  source 1..18: mol_type = other RNA
aaaactggaatgactgaa

SEQ ID NO: 595 - RNA, 19 nt, synthetic construct
  misc_feature 1..19: note = Targeting domain
  source 1..19: mol_type = other RNA
aaaaactggaatgactgaa

SEQ ID NO: 596 - RNA, 20 nt, synthetic construct
  misc_feature 1..20: note = Targeting domain
  source 1..20: mol_type = other RNA
gaaaaactggaatgactgaa

SEQ ID NO: 597 - RNA, 21 nt, synthetic construct
  misc_feature 1..21: note = Targeting domain
  source 1..21: mol_type = other RNA
agaaaaactggaatgactgaa

SEQ ID NO: 598 - RNA, 22 nt, synthetic construct
  misc_feature 1..22: note = Targeting domain
  source 1..22: mol_type = other RNA
gagaaaaactggaatgactgaa

SEQ ID NO: 599 - RNA, 23 nt, synthetic construct
  misc_feature 1..23: note = Targeting domain
  source 1..23: mol_type = other RNA
agagaaaaactggaatgactgaa

SEQ ID NO: 600 - RNA, 24 nt, synthetic construct
  misc_feature 1..24: note = Targeting domain
  source 1..24: mol_type = other RNA
tagagaaaaactggaatgactgaa

SEQ ID NO: 601 - RNA, 18 nt, synthetic construct
  misc_feature 1..18: note = Targeting domain
  source 1..18: mol_type = other RNA
gctagggatgaagaataa

SEQ ID NO: 602 - RNA, 19 nt, synthetic construct
  misc_feature 1..19: note = Targeting domain
  source 1..19: mol_type = other RNA
ggctagggatgaagaataa

SEQ ID NO: 603 - RNA, 20 nt, synthetic construct
  misc_feature 1..20: note = Targeting domain
  source 1..20: mol_type = other RNA
tggctagggatgaagaataa

SEQ ID NO: 604 - RNA, 21 nt, synthetic construct
  misc_feature 1..21: note = Targeting domain
  source 1..21: mol_type = other RNA
ctggctagggatgaagaataa

SEQ ID NO: 605 - RNA, 22 nt, synthetic construct
  misc_feature 1..22: note = Targeting domain
  source 1..22: mol_type = other RNA
gctggctagggatgaagaataa

SEQ ID NO: 606 - RNA, 23 nt, synthetic construct
  misc_feature 1..23: note = Targeting domain
  source 1..23: mol_type = other RNA
ggctggctagggatgaagaataa

SEQ ID NO: 607 - RNA, 24 nt, synthetic construct
  misc_feature 1..24: note = Targeting domain
  source 1..24: mol_type = other RNA
cggctggctagggatgaagaataa

SEQ ID NO: 608 - RNA, 18 nt, synthetic construct
  misc_feature 1..18: note = Targeting domain
  source 1..18: mol_type = other RNA
gagaaggaaactagctaa

SEQ ID NO: 609 - RNA, 19 nt, synthetic construct
  misc_feature 1..19: note = Targeting domain
  source 1..19: mol_type = other RNA
ggagaaggaaactagctaa

SEQ ID NO: 610 - RNA, 21 nt, synthetic construct
  misc_feature 1..21: note = Targeting domain
  source 1..21: mol_type = other RNA
tgggagaaggaaactagctaa

SEQ ID NO: 611 - RNA, 22 nt, synthetic construct
  misc_feature 1..22: note = Targeting domain
  source 1..22: mol_type = other RNA
atgggagaaggaaactagctaa

SEQ ID NO: 612 - RNA, 23 nt, synthetic construct
  misc_feature 1..23: note = Targeting domain
  source 1..23: mol_type = other RNA
gatgggagaaggaaactagctaa

SEQ ID NO: 613 - RNA, 24 nt, synthetic construct
  misc_feature 1..24: note = Targeting domain
  source 1..24: mol_type = other RNA
tgatgggagaaggaaactagctaa

SEQ ID NO: 614 - RNA, 18 nt, synthetic construct
  misc_feature 1..18: note = Targeting domain
  source 1..18: mol_type = other RNA
atagtcttagagtatcca

SEQ ID NO: 615 - RNA, 19 nt, synthetic construct
  misc_feature 1..19: note = Targeting domain
  source 1..19: mol_type = other RNA
aatagtcttagagtatcca

SEQ ID NO: 616 - RNA, 20 nt, synthetic construct
  misc_feature 1..20: note = Targeting domain
  source 1..20: mol_type = other RNA
caatagtcttagagtatcca

SEQ ID NO: 617 - RNA, 21 nt, synthetic construct
  misc_feature 1..21: note = Targeting domain
  source 1..21: mol_type = other RNA
ccaatagtcttagagtatcca

SEQ ID NO: 618 - RNA, 22 nt, synthetic construct
  misc_feature 1..22: note = Targeting domain
  source 1..22: mol_type = other RNA
accaatagtcttagagtatcca

SEQ ID NO: 619 - RNA, 23 nt, synthetic construct
  misc_feature 1..23: note = Targeting domain
  source 1..23: mol_type = other RNA
gaccaatagtcttagagtatcca

SEQ ID NO: 620 - RNA, 24 nt, synthetic construct
  misc_feature 1..24: note = Targeting domain
  source 1..24: mol_type = other RNA
tgaccaatagtcttagagtatcca

SEQ ID NO: 621 - RNA, 18 nt, synthetic construct
  misc_feature 1..18: note = Targeting domain
  source 1..18: mol_type = other RNA
atcctctatgatgggaga

SEQ ID NO: 622 - RNA, 19 nt, synthetic construct
  misc_feature 1..19: note = Targeting domain
  source 1..19: mol_type = other RNA
tatcctctatgatgggaga

SEQ ID NO: 623 - RNA, 21 nt, synthetic construct
  misc_feature 1..21: note = Targeting domain
  source 1..21: mol_type = other RNA
ggtatcctctatgatgggaga

SEQ ID NO: 624 - RNA, 22 nt, synthetic construct
  misc_feature 1..22: note = Targeting domain
  source 1..22: mol_type = other RNA
tggtatcctctatgatgggaga

SEQ ID NO: 625 - RNA, 23 nt, synthetic construct
  misc_feature 1..23: note = Targeting domain
  source 1..23: mol_type = other RNA
ctggtatcctctatgatgggaga

SEQ ID NO: 626 - RNA, 24 nt, synthetic construct
  misc_feature 1..24: note = Targeting domain
  source 1..24: mol_type = other RNA
cctggtatcctctatgatgggaga

SEQ ID NO: 627 - RNA, 18 nt, synthetic construct
  misc_feature 1..18: note = Targeting domain
  source 1..18: mol_type = other RNA
tcctggtatcctctatga

SEQ ID NO: 628 - RNA, 19 nt, synthetic construct
  misc_feature 1..19: note = Targeting domain
  source 1..19: mol_type = other RNA
gtcctggtatcctctatga

SEQ ID NO: 629 - RNA, 21 nt, synthetic construct
  misc_feature 1..21: note = Targeting domain
  source 1..21: mol_type = other RNA
aagtcctggtatcctctatga

SEQ ID NO: 630 - RNA, 22 nt, synthetic construct
  misc_feature 1..22: note = Targeting domain
  source 1..22: mol_type = other RNA
gaagtcctggtatcctctatga

SEQ ID NO: 631 - RNA, 23 nt, synthetic construct
  misc_feature 1..23: note = Targeting domain
  source 1..23: mol_type = other RNA
agaagtcctggtatcctctatga

SEQ ID NO: 632 - RNA, 24 nt, synthetic construct
  misc_feature 1..24: note = Targeting domain
  source 1..24: mol_type = other RNA
aagaagtcctggtatcctctatga

SEQ ID NO: 633 - RNA, 18 nt, synthetic construct
  misc_feature 1..18: note = Targeting domain
  source 1..18: mol_type = other RNA
ggagaaggaaactagcta

SEQ ID NO: 634 - RNA, 19 nt, synthetic construct
  misc_feature 1..19: note = Targeting domain
  source 1..19: mol_type = other RNA
gggagaaggaaactagcta

SEQ ID NO: 635 - RNA, 20 nt, synthetic construct
  misc_feature 1..20: note = Targeting domain
  source 1..20: mol_type = other RNA
tgggagaaggaaactagcta

SEQ ID NO: 636 - RNA, 21 nt, synthetic construct
  misc_feature 1..21: note = Targeting domain
  source 1..21: mol_type = other RNA
atgggagaaggaaactagcta

SEQ ID NO: 637 - RNA, 22 nt, synthetic construct
  misc_feature 1..22: note = Targeting domain
  source 1..22: mol_type = other RNA
gatgggagaaggaaactagcta

SEQ ID NO: 638 - RNA, 23 nt, synthetic construct
  misc_feature 1..23: note = Targeting domain
  source 1..23: mol_type = other RNA
tgatgggagaaggaaactagcta

SEQ ID NO: 639 - RNA, 24 nt, synthetic construct
  misc_feature 1..24: note = Targeting domain
  source 1..24: mol_type = other RNA
atgatgggagaaggaaactagcta

SEQ ID NO: 640 - RNA, 18 nt, synthetic construct
  misc_feature 1..18: note = Targeting domain
  source 1..18: mol_type = other RNA
aaagggaagaataaatta

SEQ ID NO: 641 - RNA, 19 nt, synthetic construct
  misc_feature 1..19: note = Targeting domain
  source 1..19: mol_type = other RNA
taaagggaagaataaatta

SEQ ID NO: 642 - RNA, 20 nt, synthetic construct
  misc_feature 1..20: note = Targeting domain
  source 1..20: mol_type = other RNA
ctaaagggaagaataaatta

SEQ ID NO: 643 - RNA, 21 nt, synthetic construct
  misc_feature 1..21: note = Targeting domain
  source 1..21: mol_type = other RNA
gctaaagggaagaataaatta

SEQ ID NO: 644 - RNA, 22 nt, synthetic construct
  misc_feature 1..22: note = Targeting domain
  source 1..22: mol_type = other RNA
agctaaagggaagaataaatta

SEQ ID NO: 645 - RNA, 23 nt, synthetic construct
  misc_feature 1..23: note = Targeting domain
  source 1..23: mol_type = other RNA
tagctaaagggaagaataaatta

SEQ ID NO: 646 - RNA, 24 nt, synthetic construct
  misc_feature 1..24: note = Targeting domain
  source 1..24: mol_type = other RNA
ctagctaaagggaagaataaatta

SEQ ID NO: 647 - RNA, 18 nt, synthetic construct
  misc_feature 1..18: note = Targeting domain
  source 1..18: mol_type = other RNA
agagtatccagtgaggcc

SEQ ID NO: 648 - RNA, 19 nt, synthetic construct
  misc_feature 1..19: note = Targeting domain
  source 1..19: mol_type = other RNA
tagagtatccagtgaggcc

SEQ ID NO: 649 - RNA, 21 nt, synthetic construct
  misc_feature 1..21: note = Targeting domain
  source 1..21: mol_type = other RNA
cttagagtatccagtgaggcc

SEQ ID NO: 650 - RNA, 22 nt, synthetic construct
  misc_feature 1..22: note = Targeting domain
  source 1..22: mol_type = other RNA
tcttagagtatccagtgaggcc

SEQ ID NO: 651 - RNA, 23 nt, synthetic construct
  misc_feature 1..23: note = Targeting domain
  source 1..23: mol_type = other RNA
gtcttagagtatccagtgaggcc

SEQ ID NO: 652 - RNA, 24 nt, synthetic construct
  misc_feature 1..24: note = Targeting domain
  source 1..24: mol_type = other RNA
agtcttagagtatccagtgaggcc

SEQ ID NO: 653 - RNA, 18 nt, synthetic construct
  misc_feature 1..18: note = Targeting domain
  source 1..18: mol_type = other RNA
tagagtatccagtgaggc

SEQ ID NO: 654 - RNA, 19 nt, synthetic construct
  misc_feature 1..19: note = Targeting domain
  source 1..19: mol_type = other RNA
ttagagtatccagtgaggc

SEQ ID NO: 655 - RNA, 20 nt, synthetic construct
  misc_feature 1..20: note = Targeting domain
  source 1..20: mol_type = other RNA
cttagagtatccagtgaggc

SEQ ID NO: 656 - RNA, 21 nt, synthetic construct
  misc_feature 1..21: note = Targeting domain
  source 1..21: mol_type = other RNA
tcttagagtatccagtgaggc

SEQ ID NO: 657 - RNA, 22 nt, synthetic construct
  misc_feature 1..22: note = Targeting domain
  source 1..22: mol_type = other RNA
gtcttagagtatccagtgaggc

SEQ ID NO: 658 - RNA, 23 nt, synthetic construct
  misc_feature 1..23: note = Targeting domain
  source 1..23: mol_type = other RNA
agtcttagagtatccagtgaggc

SEQ ID NO: 659 - RNA, 24 nt, synthetic construct
  misc_feature 1..24: note = Targeting domain
  source 1..24: mol_type = other RNA
tagtcttagagtatccagtgaggc

SEQ ID NO: 660 - RNA, 18 nt, synthetic construct
  misc_feature 1..18: note = Targeting domain
  source 1..18: mol_type = other RNA
caggggccggcggctggc

SEQ ID NO: 661 - RNA, 19 nt, synthetic construct
  misc_feature 1..19: note = Targeting domain
  source 1..19: mol_type = other RNA
ccaggggccggcggctggc

SEQ ID NO: 662 - RNA, 20 nt, synthetic construct
  misc_feature 1..20: note = Targeting domain
  source 1..20: mol_type = other RNA
gccaggggccggcggctggc

SEQ ID NO: 663 - RNA, 21 nt, synthetic construct
  misc_feature 1..21: note = Targeting domain
  source 1..21: mol_type = other RNA
ggccaggggccggcggctggc

SEQ ID NO: 664 - RNA, 22 nt, synthetic construct
  misc_feature 1..22: note = Targeting domain
  source 1..22: mol_type = other RNA
aggccaggggccggcggctggc

SEQ ID NO: 665 - RNA, 23 nt, synthetic construct
  misc_feature 1..23: note = Targeting domain
  source 1..23: mol_type = other RNA
gaggccaggggccggcggctggc

SEQ ID NO: 666 - RNA, 24 nt, synthetic construct
  misc_feature 1..24: note = Targeting domain
  source 1..24: mol_type = other RNA
tgaggccaggggccggcggctggc

SEQ ID NO: 667 - RNA, 18 nt, synthetic construct
  misc_feature 1..18: note = Targeting domain
  source 1..18: mol_type = other RNA
aaaattagcagtatcctc

SEQ ID NO: 668 - RNA, 19 nt, synthetic construct
  misc_feature 1..19: note = Targeting domain
  source 1..19: mol_type = other RNA
aaaaattagcagtatcctc

SEQ ID NO: 669 - RNA, 20 nt, synthetic construct
  misc_feature 1..20: note = Targeting domain
  source 1..20: mol_type = other RNA
aaaaaattagcagtatcctc

SEQ ID NO: 670 - RNA, 21 nt, synthetic construct
  misc_feature 1..21: note = Targeting domain
  source 1..21: mol_type = other RNA
aaaaaaattagcagtatcctc

SEQ ID NO: 671 - RNA, 22 nt, synthetic construct
  misc_feature 1..22: note = Targeting domain
  source 1..22: mol_type = other RNA
aaaaaaaattagcagtatcctc

SEQ ID NO: 672 - RNA, 23 nt, synthetic construct
  misc_feature 1..23: note = Targeting domain
  source 1..23: mol_type = other RNA
taaaaaaaattagcagtatcctc

SEQ ID NO: 673 - RNA, 24 nt, synthetic construct
  misc_feature 1..24: note = Targeting domain
  source 1..24: mol_type = other RNA
ataaaaaaaattagcagtatcctc

SEQ ID NO: 674 - RNA, 18 nt, synthetic construct
  misc_feature 1..18: note = Targeting domain
  source 1..18: mol_type = other RNA
gttccacacactcgcttc

SEQ ID NO: 675 - RNA, 19 nt, synthetic construct
  misc_feature 1..19: note = Targeting domain
  source 1..19: mol_type = other RNA
agttccacacactcgcttc

SEQ ID NO: 676 - RNA, 21 nt, synthetic construct
  misc_feature 1..21: note = Targeting domain
  source 1..21: mol_type = other RNA
gcagttccacacactcgcttc

SEQ ID NO: 677 - RNA, 22 nt, synthetic construct
  misc_feature 1..22: note = Targeting domain
  source 1..22: mol_type = other RNA
agcagttccacacactcgcttc

SEQ ID NO: 678 - RNA, 23 nt, synthetic construct
  misc_feature 1..23: note = Targeting domain
  source 1..23: mol_type = other RNA
cagcagttccacacactcgcttc

SEQ ID NO: 679 - RNA, 24 nt, synthetic construct
  misc_feature 1..24: note = Targeting domain
  source 1..24: mol_type = other RNA
tcagcagttccacacactcgcttc

SEQ ID NO: 680 - RNA, 18 nt, synthetic construct
  misc_feature 1..18: note = Targeting domain
  source 1..18: mol_type = other RNA
tatcctctatgatgggag

SEQ ID NO: 681 - RNA, 19 nt, synthetic construct
  misc_feature 1..19: note = Targeting domain
  source 1..19: mol_type = other RNA
gtatcctctatgatgggag

SEQ ID NO: 682 - RNA, 20 nt, synthetic construct
  misc_feature 1..20: note = Targeting domain
  source 1..20: mol_type = other RNA
ggtatcctctatgatgggag

SEQ ID NO: 683 - RNA, 21 nt, synthetic construct
  misc_feature 1..21: note = Targeting domain
  source 1..21: mol_type = other RNA
tggtatcctctatgatgggag

SEQ ID NO: 684 - RNA, 22 nt, synthetic construct
  misc_feature 1..22: note = Targeting domain
  source 1..22: mol_type = other RNA
ctggtatcctctatgatgggag

SEQ ID NO: 685 - RNA, 23 nt, synthetic construct
  misc_feature 1..23: note = Targeting domain
  source 1..23: mol_type = other RNA
cctggtatcctctatgatgggag

SEQ ID NO: 686 - RNA, 24 nt, synthetic construct
  misc_feature 1..24: note = Targeting domain
  source 1..24: mol_type = other RNA
tcctggtatcctctatgatgggag

SEQ ID NO: 687 - RNA, 18 nt, synthetic construct
  misc_feature 1..18: note = Targeting domain
  source 1..18: mol_type = other RNA
gccggcggctggctaggg

SEQ ID NO: 688 - RNA, 19 nt, synthetic construct
  misc_feature 1..19: note = Targeting domain
  source 1..19: mol_type = other RNA
ggccggcggctggctaggg

SEQ ID NO: 689 - RNA, 20 nt, synthetic construct
  misc_feature 1..20: note = Targeting domain
  source 1..20: mol_type = other RNA
gggccggcggctggctaggg

SEQ ID NO: 690 - RNA, 21 nt, synthetic construct
  misc_feature 1..21: note = Targeting domain
  source 1..21: mol_type = other RNA
ggggccggcggctggctaggg

SEQ ID NO: 691 - RNA, 22 nt, synthetic construct
  misc_feature 1..22: note = Targeting domain
  source 1..22: mol_type = other RNA
aggggccggcggctggctaggg

SEQ ID NO: 692 - RNA, 23 nt, synthetic construct
  misc_feature 1..23: note = Targeting domain
  source 1..23: mol_type = other RNA
caggggccggcggctggctaggg

SEQ ID NO: 693 - RNA, 24 nt, synthetic construct
  misc_feature 1..24: note = Targeting domain
  source 1..24: mol_type = other RNA
ccaggggccggcggctggctaggg

SEQ ID NO: 694 - RNA, 18 nt, synthetic construct
  misc_feature 1..18: note = Targeting domain
  source 1..18: mol_type = other RNA
tggtatcctctatgatgg

SEQ ID NO: 695 - RNA, 19 nt, synthetic construct
  misc_feature 1..19: note = Targeting domain
  source 1..19: mol_type = other RNA
ctggtatcctctatgatgg

SEQ ID NO: 696 - RNA, 20 nt, synthetic construct
  misc_feature 1..20: note = Targeting domain
  source 1..20: mol_type = other RNA
cctggtatcctctatgatgg

SEQ ID NO: 697 - RNA, 21 nt, synthetic construct
  misc_feature 1..21: note = Targeting domain
  source 1..21: mol_type = other RNA
tcctggtatcctctatgatgg

SEQ ID NO: 698 - RNA, 22 nt, synthetic construct
  misc_feature 1..22: note = Targeting domain
  source 1..22: mol_type = other RNA
gtcctggtatcctctatgatgg

SEQ ID NO: 699 - RNA, 23 nt, synthetic construct
  misc_feature 1..23: note = Targeting domain
  source 1..23: mol_type = other RNA
agtcctggtatcctctatgatgg

SEQ ID NO: 700 - RNA, 24 nt, synthetic construct
  misc_feature 1..24: note = Targeting domain
  source 1..24: mol_type = other RNA
aagtcctggtatcctctatgatgg

SEQ ID NO: 701 - RNA, 18 nt, synthetic construct
  misc_feature 1..18: note = Targeting domain
  source 1..18: mol_type = other RNA
gtcctggtatcctctatg

SEQ ID NO: 702 - RNA, 19 nt, synthetic construct
  misc_feature 1..19: note = Targeting domain
  source 1..19: mol_type = other RNA
agtcctggtatcctctatg

SEQ ID NO: 703 - RNA, 20 nt, synthetic construct
  misc_feature 1..20: note = Targeting domain
  source 1..20: mol_type = other RNA
aagtcctggtatcctctatg

SEQ ID NO: 704 - RNA, 21 nt, synthetic construct
  misc_feature 1..21: note = Targeting domain
  source 1..21: mol_type = other RNA
gaagtcctggtatcctctatg

SEQ ID NO: 705 - RNA, 22 nt, synthetic construct
  misc_feature 1..22: note = Targeting domain
  source 1..22: mol_type = other RNA
agaagtcctggtatcctctatg

SEQ ID NO: 706 - RNA, 23 nt, synthetic construct
  misc_feature 1..23: note = Targeting domain
  source 1..23: mol_type = other RNA
aagaagtcctggtatcctctatg

SEQ ID NO: 707 - RNA, 24 nt, synthetic construct
  misc_feature 1..24: note = Targeting domain
  source 1..24: mol_type = other RNA
aaagaagtcctggtatcctctatg

SEQ ID NO: 708 - RNA, 18 nt, synthetic construct
  misc_feature 1..18: note = Targeting domain
  source 1..18: mol_type = other RNA
ctaaagggaagaataaat

SEQ ID NO: 709 - RNA, 19 nt, synthetic construct
  misc_feature 1..19: note = Targeting domain
  source 1..19: mol_type = other RNA
gctaaagggaagaataaat

SEQ ID NO: 710 - RNA, 20 nt, synthetic construct
  misc_feature 1..20: note = Targeting domain
  source 1..20: mol_type = other RNA
agctaaagggaagaataaat

SEQ ID NO: 711 - RNA, 21 nt, synthetic construct
  misc_feature 1..21: note = Targeting domain
  source 1..21: mol_type = other RNA
tagctaaagggaagaataaat

SEQ ID NO: 712 - RNA, 22 nt, synthetic construct
  misc_feature 1..22: note = Targeting domain
  source 1..22: mol_type = other RNA
ctagctaaagggaagaataaat

SEQ ID NO: 713 - RNA, 23 nt, synthetic construct
  misc_feature 1..23: note = Targeting domain
  source 1..23: mol_type = other RNA
actagctaaagggaagaataaat

SEQ ID NO: 714 - RNA, 24 nt, synthetic construct
  misc_feature 1..24: note = Targeting domain
  source 1..24: mol_type = other RNA
aactagctaaagggaagaataaat

SEQ ID NO: 715 - RNA, 18 nt, synthetic construct
  misc_feature 1..18: note = Targeting domain
  source 1..18: mol_type = other RNA
aaactggaatgactgaat

SEQ ID NO: 716 - RNA, 19 nt, synthetic construct
  misc_feature 1..19: note = Targeting domain
  source 1..19: mol_type = other RNA
aaaactggaatgactgaat

SEQ ID NO: 717 - RNA, 21 nt, synthetic construct
  misc_feature 1..21: note = Targeting domain
  source 1..21: mol_type = other RNA
gaaaaactggaatgactgaat

SEQ ID NO: 718 - RNA, 22 nt, synthetic construct
  misc_feature 1..22: note = Targeting domain
  source 1..22: mol_type = other RNA
agaaaaactggaatgactgaat

SEQ ID NO: 719 - RNA, 23 nt, synthetic construct
  misc_feature 1..23: note = Targeting domain
  source 1..23: mol_type = other RNA
gagaaaaactggaatgactgaat

SEQ ID NO: 720 - RNA, 24 nt, synthetic construct
  misc_feature 1..24: note = Targeting domain
  source 1..24: mol_type = other RNA
agagaaaaactggaatgactgaat

SEQ ID NO: 721 - RNA, 18 nt, synthetic construct
  misc_feature 1..18: note = Targeting domain
  source 1..18: mol_type = other RNA
cctggtatcctctatgat

SEQ ID NO: 722 - RNA, 19 nt, synthetic construct
  misc_feature 1..19: note = Targeting domain
  source 1..19: mol_type = other RNA
tcctggtatcctctatgat

SEQ ID NO: 723 - RNA, 21 nt, synthetic construct
  misc_feature 1..21: note = Targeting domain
  source 1..21: mol_type = other RNA
agtcctggtatcctctatgat

SEQ ID NO: 724 - RNA, 22 nt, synthetic construct
  misc_feature 1..22: note = Targeting domain
  source 1..22: mol_type = other RNA
aagtcctggtatcctctatgat

SEQ ID NO: 725 - RNA, 23 nt, synthetic construct
  misc_feature 1..23: note = Targeting domain
  source 1..23: mol_type = other RNA
gaagtcctggtatcctctatgat

SEQ ID NO: 726 - RNA, 24 nt, synthetic construct
  misc_feature 1..24: note = Targeting domain
  source 1..24: mol_type = other RNA
agaagtcctggtatcctctatgat

SEQ ID NO: 727 - RNA, 18 nt, synthetic construct
  misc_feature 1..18: note = Targeting domain
  source 1..18: mol_type = other RNA
aaattagcagtatcctct

SEQ ID NO: 728 - RNA, 19 nt, synthetic construct
  misc_feature 1..19: note = Targeting domain
  source 1..19: mol_type = other RNA
aaaattagcagtatcctct

SEQ ID NO: 729 - RNA, 21 nt, synthetic construct
  misc_feature 1..21: note = Targeting domain
  source 1..21: mol_type = other RNA
aaaaaattagcagtatcctct

SEQ ID NO: 730 - RNA, 22 nt, synthetic construct
  misc_feature 1..22: note = Targeting domain
  source 1..22: mol_type = other RNA
aaaaaaattagcagtatcctct

SEQ ID NO: 731 - RNA, 23 nt, synthetic construct
  misc_feature 1..23: note = Targeting domain
  source 1..23: mol_type = other RNA
aaaaaaaattagcagtatcctct

SEQ ID NO: 732 - RNA, 24 nt, synthetic construct
  misc_feature 1..24: note = Targeting domain
  source 1..24: mol_type = other RNA
taaaaaaaattagcagtatcctct

SEQ ID NO: 733 - RNA, 18 nt, synthetic construct
  misc_feature 1..18: note = Targeting domain
  source 1..18: mol_type = other RNA
cactcgcttctggaacgt

SEQ ID NO: 734 - RNA, 19 nt, synthetic construct
  misc_feature 1..19: note = Targeting domain
  source 1..19: mol_type = other RNA
acactcgcttctggaacgt

SEQ ID NO: 735 - RNA, 20 nt, synthetic construct
  misc_feature 1..20: note = Targeting domain
  source 1..20: mol_type = other RNA
cacactcgcttctggaacgt

SEQ ID NO: 736 - RNA, 21 nt, synthetic construct
  misc_feature 1..21: note = Targeting domain
  source 1..21: mol_type = other RNA
acacactcgcttctggaacgt

SEQ ID NO: 737 - RNA, 22 nt, synthetic construct
  misc_feature 1..22: note = Targeting domain
  source 1..22: mol_type = other RNA
cacacactcgcttctggaacgt

SEQ ID NO: 738 - RNA, 23 nt, synthetic construct
  misc_feature 1..23: note = Targeting domain
  source 1..23: mol_type = other RNA
ccacacactcgcttctggaacgt

SEQ ID NO: 739 - RNA, 24 nt, synthetic construct
  misc_feature 1..24: note = Targeting domain
  source 1..24: mol_type = other RNA
tccacacactcgcttctggaacgt

SEQ ID NO: 740 - RNA, 18 nt, synthetic construct
  misc_feature 1..18: note = Targeting domain
  source 1..18: mol_type = other RNA
ctcaatgcaaatatctgt

SEQ ID NO: 741 - RNA, 19 nt, synthetic construct
  misc_feature 1..19: note = Targeting domain
  source 1..19: mol_type = other RNA
tctcaatgcaaatatctgt

SEQ ID NO: 742 - RNA, 20 nt, synthetic construct
  misc_feature 1..20: note = Targeting domain
  source 1..20: mol_type = other RNA
atctcaatgcaaatatctgt

SEQ ID NO: 743 - RNA, 21 nt, synthetic construct
  misc_feature 1..21: note = Targeting domain
  source 1..21: mol_type = other RNA
tatctcaatgcaaatatctgt

SEQ ID NO: 744 - RNA, 22 nt, synthetic construct
  misc_feature 1..22: note = Targeting domain
  source 1..22: mol_type = other RNA
ctatctcaatgcaaatatctgt

SEQ ID NO: 745 - RNA, 23 nt, synthetic construct
  misc_feature 1..23: note = Targeting domain
  source 1..23: mol_type = other RNA
actatctcaatgcaaatatctgt

SEQ ID NO: 746 - RNA, 24 nt, synthetic construct
  misc_feature 1..24: note = Targeting domain
  source 1..24: mol_type = other RNA
cactatctcaatgcaaatatctgt

SEQ ID NO: 747 - RNA, 18 nt, synthetic construct
  misc_feature 1..18: note = Targeting domain
  source 1..18: mol_type = other RNA
agttccacacactcgctt

SEQ ID NO: 748 - RNA, 19 nt, synthetic construct
  misc_feature 1..19: note = Targeting domain
  source 1..19: mol_type = other RNA
cagttccacacactcgctt

SEQ ID NO: 749 - RNA, 20 nt, synthetic construct
  misc_feature 1..20: note = Targeting domain
  source 1..20: mol_type = other RNA
gcagttccacacactcgctt

SEQ ID NO: 750 - RNA, 21 nt, synthetic construct
  misc_feature 1..21: note = Targeting domain
  source 1..21: mol_type = other RNA
agcagttccacacactcgctt

SEQ ID NO: 751 - RNA, 22 nt, synthetic construct
  misc_feature 1..22: note = Targeting domain
  source 1..22: mol_type = other RNA
cagcagttccacacactcgctt

SEQ ID NO: 752 - RNA, 23 nt, synthetic construct
  misc_feature 1..23: note = Targeting domain
  source 1..23: mol_type = other RNA
tcagcagttccacacactcgctt

SEQ ID NO: 753 - RNA, 24 nt, synthetic construct
  misc_feature 1..24: note = Targeting domain
  source 1..24: mol_type = other RNA
ttcagcagttccacacactcgctt

SEQ ID NO: 754 - RNA, 18 nt, synthetic construct
  misc_feature 1..18: note = Targeting domain
  source 1..18: mol_type = other RNA
aattagcagtatcctctt

SEQ ID NO: 755 - RNA, 19 nt, synthetic construct
  misc_feature 1..19: note = Targeting domain
  source 1..19: mol_type = other RNA
aaattagcagtatcctctt

SEQ ID NO: 756 - RNA, 21 nt, synthetic construct
  misc_feature 1..21: note = Targeting domain
  source 1..21: mol_type = other RNA
aaaaattagcagtatcctctt

SEQ ID NO: 757 - RNA, 22 nt, synthetic construct
  misc_feature 1..22: note = Targeting domain
  source 1..22: mol_type = other RNA
aaaaaattagcagtatcctctt

SEQ ID NO: 758 - RNA, 23 nt, synthetic construct
  misc_feature 1..23: note = Targeting domain
  source 1..23: mol_type = other RNA
aaaaaaattagcagtatcctctt

SEQ ID NO: 759 - RNA, 24 nt, synthetic construct
  misc_feature 1..24: note = Targeting domain
  source 1..24: mol_type = other RNA
aaaaaaaattagcagtatcctctt

SEQ ID NO: 760 - RNA, 17 nt, synthetic construct
  misc_feature 1..17: note = Targeting domain
  source 1..17: mol_type = other RNA
gaagaaaactagctaaa

SEQ ID NO: 761 - RNA, 17 nt, synthetic construct
  misc_feature 1..17: note = Targeting domain
  source 1..17: mol_type = other RNA
gcagcagtatcctcttg

SEQ ID NO: 762 - RNA, 20 nt, synthetic construct
  misc_feature 1..20: note = Targeting domain
  source 1..20: mol_type = other RNA
ggagaagaaaactagctaaa

SEQ ID NO: 763 - RNA, 20 nt, synthetic construct
  misc_feature 1..20: note = Targeting domain
  source 1..20: mol_type = other RNA
gggagaagaaaactagctaa

SEQ ID NO: 764 - RNA, 20 nt, synthetic construct
  misc_feature 1..20: note = Targeting domain
  source 1..20: mol_type = other RNA
gtcctggtatcttctatggt

SEQ ID NO: 765 - RNA, 17 nt, synthetic construct
  misc_feature 1..17: note = Targeting domain
  source 1..17: mol_type = other RNA
agaagaaaactagctaa

SEQ ID NO: 766 - RNA, 17 nt, synthetic construct
  misc_feature 1..17: note = Targeting domain
  source 1..17: mol_type = other RNA
agtcctggtatcttcta

SEQ ID NO: 767 - RNA, 17 nt, synthetic construct
  misc_feature 1..17: note = Targeting domain
  source 1..17: mol_type = other RNA
ccaccatagaagatacc

SEQ ID NO: 768 - RNA, 17 nt, synthetic construct
  misc_feature 1..17: note = Targeting domain
  source 1..17: mol_type = other RNA
cctggtatcttctatgg

SEQ ID NO: 769 - RNA, 17 nt, synthetic construct
  misc_feature 1..17: note = Targeting domain
  source 1..17: mol_type = other RNA
cagcagtatcctcttgg

SEQ ID NO: 770 - RNA, 17 nt, synthetic construct
  misc_feature 1..17: note = Targeting domain
  source 1..17: mol_type = other RNA
aattggaatgactgaat

SEQ ID NO: 771 - RNA, 17 nt, synthetic construct
  misc_feature 1..17: note = Targeting domain
  source 1..17: mol_type = other RNA
ctggtatcttctatggt

SEQ ID NO: 772 - RNA, 17 nt, synthetic construct
  misc_feature 1..17: note = Targeting domain
  source 1..17: mol_type = other RNA
agcagcagtatcctctt

SEQ ID NO: 773 - RNA, 20 nt, synthetic construct
  misc_feature 1..20: note = Targeting domain
  source 1..20: mol_type = other RNA
agaagtcctggtatcttcta

SEQ ID NO: 774 - RNA, 20 nt, synthetic construct
  misc_feature 1..20: note = Targeting domain
  source 1..20: mol_type = other RNA
ctcccaccatagaagatacc

SEQ ID NO: 775 - RNA, 20 nt, synthetic construct
  misc_feature 1..20: note = Targeting domain
  source 1..20: mol_type = other RNA
agtcctggtatcttctatgg

SEQ ID NO: 776 - RNA, 20 nt, synthetic construct
  misc_feature 1..20: note = Targeting domain
  source 1..20: mol_type = other RNA
aagcagcagtatcctcttgg

SEQ ID NO: 777 - RNA, 20 nt, synthetic construct
  misc_feature 1..20: note = Targeting domain
  source 1..20: mol_type = other RNA
taagcagcagtatcctcttg

SEQ ID NO: 778 - RNA, 20 nt, synthetic construct
  misc_feature 1..20: note = Targeting domain
  source 1..20: mol_type = other RNA
agaataaattagagaaaaat

SEQ ID NO: 779 - RNA, 20 nt, synthetic construct
  misc_feature 1..20: note = Targeting domain
  source 1..20: mol_type = other RNA
aaaaattggaatgactgaat

SEQ ID NO: 780 - RNA, 20 nt, synthetic construct
  misc_feature 1..20: note = Targeting domain
  source 1..20: mol_type = other RNA
attaagcagcagtatcctct

SEQ ID NO: 781 - RNA, 20 nt, synthetic construct
  misc_feature 1..20: note = Targeting domain
  source 1..20: mol_type = other RNA
ttaagcagcagtatcctctt

SEQ ID NO: 782 - RNA, 17 nt, synthetic construct
  misc_feature 1..17: note = Targeting domain
  source 1..17: mol_type = other RNA
ataaattagagaaaaat

SEQ ID NO: 783 - RNA, 17 nt, synthetic construct
  misc_feature 1..17: note = Targeting domain
  source 1..17: mol_type = other RNA
aagcagcagtatcctct

SEQ ID NO: 784 - RNA, 20 nt, synthetic construct
  misc_feature 1..20: note = Targeting domain
  source 1..20: mol_type = other RNA
gaagaaaactagctaaaggg

SEQ ID NO: 785 - RNA, 22 nt, synthetic construct
  misc_feature 1..22: note = Targeting domain
  source 1..22: mol_type = other RNA
gagaagaaaactagctaaaggg

SEQ ID NO: 786 - RNA, 23 nt, synthetic construct
  misc_feature 1..23: note = Targeting domain
  source 1..23: mol_type = other RNA
ggagaagaaaactagctaaaggg

SEQ ID NO: 787 - RNA, 24 nt, synthetic construct
  misc_feature 1..24: note = Targeting domain
  source 1..24: mol_type = other RNA
gggagaagaaaactagctaaaggg

SEQ ID NO: 788 - RNA, 19 nt, synthetic construct
  misc_feature 1..19: note = Targeting domain
  source 1..19: mol_type = other RNA
gaataaattagagaaaaat

SEQ ID NO: 789 - RNA, 22 nt, synthetic construct
  misc_feature 1..22: note = Targeting domain
  source 1..22: mol_type = other RNA
gaagaataaattagagaaaaat

SEQ ID NO: 790 - RNA, 23 nt, synthetic construct
  misc_feature 1..23: note = Targeting domain
  source 1..23: mol_type = other RNA
ggaagaataaattagagaaaaat

SEQ ID NO: 791 - RNA, 24 nt, synthetic construct
  misc_feature 1..24: note = Targeting domain
  source 1..24: mol_type = other RNA
gggaagaataaattagagaaaaat

SEQ ID NO: 792 - RNA, 18 nt, synthetic construct
  misc_feature 1..18: note = Targeting domain
  source 1..18: mol_type = other RNA
agagaaaaattggaatga

SEQ ID NO: 793 - RNA, 19 nt, synthetic construct
  misc_feature 1..19: note = Targeting domain
  source 1..19: mol_type = other RNA
tagagaaaaattggaatga

SEQ ID NO: 794 - RNA, 20 nt, synthetic construct
  misc_feature 1..20: note = Targeting domain
  source 1..20: mol_type = other RNA
ttagagaaaaattggaatga

SEQ ID NO: 795 - RNA, 21 nt, synthetic construct
  misc_feature 1..21: note = Targeting domain
  source 1..21: mol_type = other RNA
attagagaaaaattggaatga

SEQ ID NO: 796 - RNA, 22 nt, synthetic construct
  misc_feature 1..22: note = Targeting domain
  source 1..22: mol_type = other RNA
aattagagaaaaattggaatga

SEQ ID NO: 797 - RNA, 23 nt, synthetic construct
  misc_feature 1..23: note = Targeting domain
  source 1..23: mol_type = other RNA
aaattagagaaaaattggaatga

SEQ ID NO: 798 - RNA, 24 nt, synthetic construct
  misc_feature 1..24: note = Targeting domain
  source 1..24: mol_type = other RNA
taaattagagaaaaattggaatga

SEQ ID NO: 799 - RNA, 18 nt, synthetic construct
  misc_feature 1..18: note = Targeting domain
  source 1..18: mol_type = other RNA
agaaaactagctaaaggg

SEQ ID NO: 800 - RNA, 19 nt, synthetic construct
  misc_feature 1..19: note = Targeting domain
  source 1..19: mol_type = other RNA
aagaaaactagctaaaggg

SEQ ID NO: 801 - RNA, 21 nt, synthetic construct
  misc_feature 1..21: note = Targeting domain
  source 1..21: mol_type = other RNA
agaagaaaactagctaaaggg

SEQ ID NO: 802 - RNA, 18 nt, synthetic construct
  misc_feature 1..18: note = Targeting domain
  source 1..18: mol_type = other RNA
aataaattagagaaaaat

SEQ ID NO: 803 - RNA, 21 nt, synthetic construct
  misc_feature 1..21: note = Targeting domain
  source 1..21: mol_type = other RNA
aagaataaattagagaaaaat

SEQ ID NO: 804 - RNA, 18 nt, synthetic construct
  misc_feature 1..18: note = Targeting domain
  source 1..18: mol_type = other RNA
agttttcttctcccacca

SEQ ID NO: 805 - RNA, 19 nt, synthetic construct
  misc_feature 1..19: note = Targeting domain
  source 1..19: mol_type = other RNA
tagttttcttctcccacca

SEQ ID NO: 806 - RNA, 20 nt, synthetic construct
  misc_feature 1..20: note = Targeting domain
  source 1..20: mol_type = other RNA
ctagttttcttctcccacca

SEQ ID NO: 807 - RNA, 21 nt, synthetic construct
  misc_feature 1..21: note = Targeting domain
  source 1..21: mol_type = other RNA
gctagttttcttctcccacca

SEQ ID NO: 808 - RNA, 22 nt, synthetic construct
  misc_feature 1..22: note = Targeting domain
  source 1..22: mol_type = other RNA
agctagttttcttctcccacca

SEQ ID NO: 809 - RNA, 23 nt, synthetic construct
  misc_feature 1..23: note = Targeting domain
  source 1..23: mol_type = other RNA
tagctagttttcttctcccacca

SEQ ID NO: 810 - RNA, 24 nt, synthetic construct
  misc_feature 1..24: note = Targeting domain
  source 1..24: mol_type = other RNA
ttagctagttttcttctcccacca

SEQ ID NO: 811 - RNA, 18 nt, synthetic construct
  misc_feature 1..18: note = Targeting domain
  source 1..18: mol_type = other RNA
tcccaccatagaagatac

SEQ ID NO: 812 - RNA, 19 nt, synthetic construct
  misc_feature 1..19: note = Targeting domain
  source 1..19: mol_type = other RNA
ctcccaccatagaagatac

SEQ ID NO: 813 - RNA, 20 nt, synthetic construct
  misc_feature 1..20: note = Targeting domain
  source 1..20: mol_type = other RNA
tctcccaccatagaagatac

SEQ ID NO: 814 - RNA, 21 nt, synthetic construct
  misc_feature 1..21: note = Targeting domain
  source 1..21: mol_type = other RNA
ttctcccaccatagaagatac

SEQ ID NO: 815 - RNA, 22 nt, synthetic construct
  misc_feature 1..22: note = Targeting domain
  source 1..22: mol_type = other RNA
cttctcccaccatagaagatac

SEQ ID NO: 816 - RNA, 23 nt, synthetic construct
  misc_feature 1..23: note = Targeting domain
  source 1..23: mol_type = other RNA
tcttctcccaccatagaagatac

SEQ ID NO: 817 - RNA, 24 nt, synthetic construct
  misc_feature 1..24: note = Targeting domain
  source 1..24: mol_type = other RNA
ttcttctcccaccatagaagatac

SEQ ID NO: 818 - RNA, 18 nt, synthetic construct
  misc_feature 1..18: note = Targeting domain
  source 1..18: mol_type = other RNA
agaagaaaactagctaaa

SEQ ID NO: 819 - RNA, 19 nt, synthetic construct
  misc_feature 1..19: note = Targeting domain
  source 1..19: mol_type = other RNA
gagaagaaaactagctaaa

SEQ ID NO: 820 - RNA, 21 nt, synthetic construct
  misc_feature 1..21: note = Targeting domain
  source 1..21: mol_type = other RNA
gggagaagaaaactagctaaa

SEQ ID NO: 821 - RNA, 22 nt, synthetic construct
  misc_feature 1..22: note = Targeting domain
  source 1..22: mol_type = other RNA
tgggagaagaaaactagctaaa

SEQ ID NO: 822 - RNA, 23 nt, synthetic construct
  misc_feature 1..23: note = Targeting domain
  source 1..23: mol_type = other RNA
gtgggagaagaaaactagctaaa

SEQ ID NO: 823 - RNA, 24 nt, synthetic construct
  misc_feature 1..24: note = Targeting domain
  source 1..24: mol_type = other RNA
ggtgggagaagaaaactagctaaa

SEQ ID NO: 824 - RNA, 18 nt, synthetic construct
  misc_feature 1..18: note = Targeting domain
  source 1..18: mol_type = other RNA
aaaattggaatgactgaa

SEQ ID NO: 825 - RNA, 19 nt, synthetic construct
  misc_feature 1..19: note = Targeting domain
  source 1..19: mol_type = other RNA
aaaaattggaatgactgaa

SEQ ID NO: 826 - RNA, 20 nt, synthetic construct
  misc_feature 1..20: note = Targeting domain
  source 1..20: mol_type = other RNA
gaaaaattggaatgactgaa

SEQ ID NO: 827 - RNA, 21 nt, synthetic construct
  misc_feature 1..21: note = Targeting domain
  source 1..21: mol_type = other RNA
agaaaaattggaatgactgaa

SEQ ID NO: 828 - RNA, 22 nt, synthetic construct
  misc_feature 1..22: note = Targeting domain
  source 1..22: mol_type = other RNA
gagaaaaattggaatgactgaa

SEQ ID NO: 829 - RNA, 23 nt, synthetic construct
  misc_feature 1..23: note = Targeting domain
  source 1..23: mol_type = other RNA
agagaaaaattggaatgactgaa

SEQ ID NO: 830 - RNA, 24 nt, synthetic construct
  misc_feature 1..24: note = Targeting domain
  source 1..24: mol_type = other RNA
tagagaaaaattggaatgactgaa

SEQ ID NO: 831 - RNA, 18 nt, synthetic construct
  misc_feature 1..18: note = Targeting domain
  source 1..18: mol_type = other RNA
gagaagaaaactagctaa

SEQ ID NO: 832 - RNA, 19 nt, synthetic construct
  misc_feature 1..19: note = Targeting domain
  source 1..19: mol_type = other RNA
ggagaagaaaactagctaa

SEQ ID NO: 833 - RNA, 21 nt, synthetic construct
  misc_feature 1..21: note = Targeting domain
  source 1..21: mol_type = other RNA
tgggagaagaaaactagctaa

SEQ ID NO: 834 - RNA, 22 nt, synthetic construct
  misc_feature 1..22: note = Targeting domain
  source 1..22: mol_type = other RNA
gtgggagaagaaaactagctaa

SEQ ID NO: 835 - RNA, 23 nt, synthetic construct
  misc_feature 1..23: note = Targeting domain
  source 1..23: mol_type = other RNA
ggtgggagaagaaaactagctaa

SEQ ID NO: 836 - RNA, 24 nt, synthetic construct
  misc_feature 1..24: note = Targeting domain
  source 1..24: mol_type = other RNA
tggtgggagaagaaaactagctaa

SEQ ID NO: 837 - RNA, 18 nt, synthetic construct
  misc_feature 1..18: note = Targeting domain
  source 1..18: mol_type = other RNA
ggagaagaaaactagcta

SEQ ID NO: 838 - RNA, 19 nt, synthetic construct
  misc_feature 1..19: note = Targeting domain
  source 1..19: mol_type = other RNA
gggagaagaaaactagcta

SEQ ID NO: 839 - RNA, 20 nt, synthetic construct
  misc_feature 1..20: note = Targeting domain
  source 1..20: mol_type = other RNA
tgggagaagaaaactagcta

SEQ ID NO: 840 - RNA, 21 nt, synthetic construct
  misc_feature 1..21: note = Targeting domain
  source 1..21: mol_type = other RNA
gtgggagaagaaaactagcta

SEQ ID NO: 841 - RNA, 22 nt, synthetic construct
  misc_feature 1..22: note = Targeting domain
  source 1..22: mol_type = other RNA
ggtgggagaagaaaactagcta

SEQ ID NO: 842 - RNA, 23 nt, synthetic construct
  misc_feature 1..23: note = Targeting domain
  source 1..23: mol_type = other RNA
tggtgggagaagaaaactagcta

SEQ ID NO: 843 - RNA, 24 nt, synthetic construct
  misc_feature 1..24: note = Targeting domain
  source 1..24: mol_type = other RNA
atggtgggagaagaaaactagcta

SEQ ID NO: 844 - RNA, 18 nt, synthetic construct
  misc_feature 1..18: note = Targeting domain
  source 1..18: mol_type = other RNA
ttaagcagcagtatcctc

SEQ ID NO: 845 - RNA, 19 nt, synthetic construct
  misc_feature 1..19: note = Targeting domain
  source 1..19: mol_type = other RNA
attaagcagcagtatcctc

SEQ ID NO: 846 - RNA, 20 nt, synthetic construct
  misc_feature 1..20: note = Targeting domain
  source 1..20: mol_type = other RNA
aattaagcagcagtatcctc

SEQ ID NO: 847 - RNA, 21 nt, synthetic construct
  misc_feature 1..21: note = Targeting domain
  source 1..21: mol_type = other RNA
aaattaagcagcagtatcctc

SEQ ID NO: 848 - RNA, 22 nt, synthetic construct
  misc_feature 1..22: note = Targeting domain
  source 1..22: mol_type = other RNA
aaaattaagcagcagtatcctc

SEQ ID NO: 849 - RNA, 23 nt, synthetic construct
  misc_feature 1..23: note = Targeting domain
  source 1..23: mol_type = other RNA
aaaaattaagcagcagtatcctc

SEQ ID NO: 850 - RNA, 24 nt, synthetic construct
  misc_feature 1..24: note = Targeting domain
  source 1..24: mol_type = other RNA
aaaaaattaagcagcagtatcctc

SEQ ID NO: 851 - RNA, 18 nt, synthetic construct
  misc_feature 1..18: note = Targeting domain
  source 1..18: mol_type = other RNA
tatcttctatggtgggag

SEQ ID NO: 852 - RNA, 19 nt, synthetic construct
  misc_feature 1..19: note = Targeting domain
  source 1..19: mol_type = other RNA
gtatcttctatggtgggag

SEQ ID NO: 853 - RNA, 20 nt, synthetic construct
  misc_feature 1..20: note = Targeting domain
  source 1..20: mol_type = other RNA
ggtatcttctatggtgggag

SEQ ID NO: 854 - RNA, 21 nt, synthetic construct
  misc_feature 1..21: note = Targeting domain
  source 1..21: mol_type = other RNA
tggtatcttctatggtgggag

SEQ ID NO: 855 - RNA, 22 nt, synthetic construct
  misc_feature 1..22: note = Targeting domain
  source 1..22: mol_type = other RNA
ctggtatcttctatggtgggag

SEQ ID NO: 856 - RNA, 23 nt, synthetic construct
  misc_feature 1..23: note = Targeting domain
  source 1..23: mol_type = other RNA
cctggtatcttctatggtgggag

SEQ ID NO: 857 - RNA, 24 nt, synthetic construct
  misc_feature 1..24: note = Targeting domain
  source 1..24: mol_type = other RNA
tcctggtatcttctatggtgggag

SEQ ID NO: 858 - RNA, 18 nt, synthetic construct
  misc_feature 1..18: note = Targeting domain
  source 1..18: mol_type = other RNA
tcctggtatcttctatgg

SEQ ID NO: 859 - RNA, 19 nt, synthetic construct
  misc_feature 1..19: note = Targeting domain
  source 1..19: mol_type = other RNA
gtcctggtatcttctatgg

SEQ ID NO: 860 - RNA, 21 nt, synthetic construct
  misc_feature 1..21: note = Targeting domain
  source 1..21: mol_type = other RNA
aagtcctggtatcttctatgg

SEQ ID NO: 861 - RNA, 22 nt, synthetic construct
  misc_feature 1..22: note = Targeting domain
  source 1..22: mol_type = other RNA
gaagtcctggtatcttctatgg

SEQ ID NO: 862 - RNA, 23 nt, synthetic construct
  misc_feature 1..23: note = Targeting domain
  source 1..23: mol_type = other RNA
agaagtcctggtatcttctatgg

SEQ ID NO: 863 - RNA, 24 nt, synthetic construct
  misc_feature 1..24: note = Targeting domain
  source 1..24: mol_type = other RNA
aagaagtcctggtatcttctatgg

SEQ ID NO: 864 - RNA, 18 nt, synthetic construct
  misc_feature 1..18: note = Targeting domain
  source 1..18: mol_type = other RNA
tggtatcttctatggtgg

SEQ ID NO: 865 - RNA, 19 nt, synthetic construct
  misc_feature 1..19: note = Targeting domain
  source 1..19: mol_type = other RNA
ctggtatcttctatggtgg

SEQ ID NO: 866 - RNA, 20 nt, synthetic construct
  misc_feature 1..20: note = Targeting domain
  source 1..20: mol_type = other RNA
cctggtatcttctatggtgg

SEQ ID NO: 867 - RNA, 21 nt, synthetic construct
  misc_feature 1..21: note = Targeting domain
  source 1..21: mol_type = other RNA
tcctggtatcttctatggtgg

SEQ ID NO: 868 - RNA, 22 nt, synthetic construct
  misc_feature 1..22: note = Targeting domain
  source 1..22: mol_type = other RNA
gtcctggtatcttctatggtgg

SEQ ID NO: 869 - RNA, 23 nt, synthetic construct
  misc_feature 1..23: note = Targeting domain
  source 1..23: mol_type = other RNA
agtcctggtatcttctatggtgg

SEQ ID NO: 870 - RNA, 24 nt, synthetic construct
  misc_feature 1..24: note = Targeting domain
  source 1..24: mol_type = other RNA
aagtcctggtatcttctatggtgg

SEQ ID NO: 871 - RNA, 18 nt, synthetic construct
  misc_feature 1..18: note = Targeting domain
  source 1..18: mol_type = other RNA
gtcctggtatcttctatg

SEQ ID NO: 872 - RNA, 19 nt, synthetic construct
  misc_feature 1..19: note = Targeting domain
  source 1..19: mol_type = other RNA
agtcctggtatcttctatg

SEQ ID NO: 873 - RNA, 20 nt, synthetic construct
  misc_feature 1..20: note = Targeting domain
  source 1..20: mol_type = other RNA
aagtcctggtatcttctatg

SEQ ID NO: 874 - RNA, 21 nt, synthetic construct
  misc_feature 1..21: note = Targeting domain
  source 1..21: mol_type = other RNA
gaagtcctggtatcttctatg

SEQ ID NO: 875 - RNA, 22 nt, synthetic construct
  misc_feature 1..22: note = Targeting domain
  source 1..22: mol_type = other RNA
agaagtcctggtatcttctatg

SEQ ID NO: 876 - RNA, 23 nt, synthetic construct
  misc_feature 1..23: note = Targeting domain
  source 1..23: mol_type = other RNA
aagaagtcctggtatcttctatg

SEQ ID NO: 877 - RNA, 24 nt, synthetic construct
  misc_feature 1..24: note = Targeting domain
  source 1..24: mol_type = other RNA
aaagaagtcctggtatcttctatg

SEQ ID NO: 878 - RNA, 18 nt, synthetic construct
  misc_feature 1..18: note = Targeting domain
  source 1..18: mol_type = other RNA
aaattggaatgactgaat

SEQ ID NO: 879 - RNA, 19 nt, synthetic construct
  misc_feature 1..19: note = Targeting domain
  source 1..19: mol_type = other RNA
aaaattggaatgactgaat

SEQ ID NO: 880 - RNA, 21 nt, synthetic construct
  misc_feature 1..21: note = Targeting domain
  source 1..21: mol_type = other RNA
gaaaaattggaatgactgaat

SEQ ID NO: 881 - RNA, 22 nt, synthetic construct
  misc_feature 1..22: note = Targeting domain
  source 1..22: mol_type = other RNA
agaaaaattggaatgactgaat

SEQ ID NO: 882 - RNA, 23 nt, synthetic construct
  misc_feature 1..23: note = Targeting domain
  source 1..23: mol_type = other RNA
gagaaaaattggaatgactgaat

SEQ ID NO: 883 - RNA, 24 nt, synthetic construct
  misc_feature 1..24: note = Targeting domain
  source 1..24: mol_type = other RNA
agagaaaaattggaatgactgaat

SEQ ID NO: 884 - RNA, 18 nt, synthetic construct
  misc_feature 1..18: note = Targeting domain
  source 1..18: mol_type = other RNA
taagcagcagtatcctct

SEQ ID NO: 885 - RNA, 19 nt, synthetic construct
  misc_feature 1..19: note = Targeting domain
  source 1..19: mol_type = other RNA
ttaagcagcagtatcctct

SEQ ID NO: 886 - RNA, 21 nt, synthetic construct
  misc_feature 1..21: note = Targeting domain
  source 1..21: mol_type = other RNA
aattaagcagcagtatcctct

SEQ ID NO: 887 - RNA, 22 nt, synthetic construct
  misc_feature 1..22: note = Targeting domain
  source 1..22: mol_type = other RNA
aaattaagcagcagtatcctct

SEQ ID NO: 888 - RNA, 23 nt, synthetic construct
  misc_feature 1..23: note = Targeting domain
  source 1..23: mol_type = other RNA
aaaattaagcagcagtatcctct

SEQ ID NO: 889 - RNA, 24 nt, synthetic construct
  misc_feature 1..24: note = Targeting domain
  source 1..24: mol_type = other RNA
aaaaattaagcagcagtatcctct

SEQ ID NO: 890 - RNA, 18 nt, synthetic construct
  misc_feature 1..18: note = Targeting domain
  source 1..18: mol_type = other RNA
cctggtatcttctatggt

SEQ ID NO: 891 - RNA, 19 nt, synthetic construct
  misc_feature 1..19: note = Targeting domain
  source 1..19: mol_type = other RNA
tcctggtatcttctatggt

SEQ ID NO: 892 - RNA, 21 nt, synthetic construct
  misc_feature 1..21: note = Targeting domain
  source 1..21: mol_type = other RNA
agtcctggtatcttctatggt

SEQ ID NO: 893 - RNA, 22 nt, synthetic construct
  misc_feature 1..22: note = Targeting domain
  source 1..22: mol_type = other RNA
aagtcctggtatcttctatggt

SEQ ID NO: 894 - RNA, 23 nt, synthetic construct
  misc_feature 1..23: note = Targeting domain
  source 1..23: mol_type = other RNA
gaagtcctggtatcttctatggt

SEQ ID NO: 895 - RNA, 24 nt, synthetic construct
  misc_feature 1..24: note = Targeting domain
  source 1..24: mol_type = other RNA
agaagtcctggtatcttctatggt

SEQ ID NO: 896 - RNA, 18 nt, synthetic construct
  misc_feature 1..18: note = Targeting domain
  source 1..18: mol_type = other RNA
aagcagcagtatcctctt

SEQ ID NO: 897 - RNA, 19 nt, synthetic construct
  misc_feature 1..19: note = Targeting domain
  source 1..19: mol_type = other RNA
taagcagcagtatcctctt

SEQ ID NO: 898 - RNA, 21 nt, synthetic construct
  misc_feature 1..21: note = Targeting domain
  source 1..21: mol_type = other RNA
attaagcagcagtatcctctt

SEQ ID NO: 899 - RNA, 22 nt, synthetic construct
  misc_feature 1..22: note = Targeting domain
  source 1..22: mol_type = other RNA
aattaagcagcagtatcctctt

SEQ ID NO: 900 - RNA, 23 nt, synthetic construct
  misc_feature 1..23: note = Targeting domain
  source 1..23: mol_type = other RNA
aaattaagcagcagtatcctctt

SEQ ID NO: 901 - RNA, 24 nt, synthetic construct
  misc_feature 1..24: note = Targeting domain
  source 1..24: mol_type = other RNA
aaaattaagcagcagtatcctctt

SEQ ID NO: 902 - DNA, 4758 bp, Homo sapiens
  misc_feature 2716..2719: note = HPFH deletion site (4 bp del -225 to -222)
  misc_feature 2748..2753: note = GATA1 binding motif
  misc_feature 2762..2767: note = GATA1 binding motif
  misc_feature 2791..2799: note = FKLF transcription factor binding motif
  misc_feature 2823..2830: note = CP1/Coup TFII binding motif
  misc_feature 2824..2836: note = HPFH deletion site (13 bp del -114 to -102)
  misc_feature 2991..2993: note = Start codon
  source 1..4758: mol_type = other DNA
tttaggaagtcaaggtttaggcagggatagccattctattttattaggggcaatactatttccaacggcatctggcttttctcagcccttgtgaggctctacagggaggttgaggtgttagagatcagagcaggaaacaggtttttctttccacggtaactacaatgaagtgatccttactttactaaggaacttttcattttaagtgttgacgcatgcctaaagaggtgaaattaatcccatacccttaagtctacagactggtcacagcatttcaaggaggagacctcattgtaagcttctagggaggtggggacttaggtgaaggaaatgagccagcagaagctcacaagtcagcatcagcgtgtcatgtctcagcagcagaacagcacggtcagatgaaaatatagtgtgaagaatttgtataacattaattgagaaggcagattcactggagttcttatataattgaaagttaatgcacgttaataagcaagagtttagtttaatgtgatggtgttatgaacttaacgcttgtgtctccagaaaattcacatgctgaatccccaactcccaattggctccatttgtgggggaggctttggaaaagtaatcaggtttagaggagctcatgagagcagatccccatcatagaattattttcctcatcagaagcagagagattagccatttctcttccttctggtgaggacacagtgggaagtcagccacctgcaacccaggaagagagccctgaccaggaaccagcagaaaagtgagaaaaaatcctgttgttgaagtcacccagtctatgctattttgttatagcaccttgcactaagtaaggcagatgaagaaagagaaaaaaataagcttcggtgttcagtggattagaaaccatgtttatctcaggtttacaaatctccacttgtcctctgtgtttcagaataaaataccaactctactactctcatctgtaagatgcaaatagtaagcctgagcccttctgtctaactttgaattctattttttcttcaacgtactttaggcttgtaatgtgtttatatacagtgaaatgtcaagttctttctttatatttctttctttcttttttttcctcagcctcagagttttccacatgcccttcctactttcaggaacttctttctccaaacgtcttctgcctggctccatcaaatcataaaggacccacttcaaatgccatcactcactaccatttcacaattcgcactttctttctttgtcctttttttttttagtaaaacaagtttataaaaaattgaaggaataaatgaatggctacttcataggcagagtagacgcaagggctactggttgccgatttttattgttatttttcaatagtatgctaaacaaggggtagattatttatgctgcccatttttagaccataaaagataacttcctgatgttgccatggcatttttttccttttaattttatttcatttcattttaatttcgaaggtacatgtgcaggatgtgcaggcttgttacatgggtaaatgtgtgtctttctggccttttagccatctgtatcaatgagcagatataagctttacacaggatcatgaaggatgaaagaatttcaccaatattataataatttcaatcaacctgatagcttaggggataaactaatttgaagatacagcttgcctccgataagccagaattccagagcttctggcattataatctagcaaggttagagatcatggatcactttcagagaaaaacaaaaacaaactaaccaaaagcaaaacagaaccaaaaaaccaccataaatacttcctaccctgttaatggtccaatatgtcagaaacagcactgtgttagaaataaagctgtctaaagtacactaatattcgagttataatagtgtgtggactattagtcaataaaaacaacccttgcctctttagagttgttttccatgtacacgcacatcttatgtcttagagtaagattccctgagaagtgaacctagcatttatacaagataattaattctaatccacagtacctgccaaagaacattctaccatcatctttactgagcatagaagagctacgccaaaaccctgggtcatcagccagcacacacacttatccagtggtaaatacacatcatctggtgtatacatacatacctgaatatggaatcaaatatttttctaagatgaaacagtcatgatttatttcaaataggtacggataagtagatattgaggtaagcattaggtcttatattatgtaacactaatctattactgcgctgaaactgtggctttatagaaattgttttcactgcactattgagaaattaagagataatggcaaaagtcacaaagagtatattcaaaaagaagtatagcactttttccttagaaaccactgctaactgaaagagactaagatttgtcccgtcaaaaatcctggacctatgcctaaaacacatttcacaatccctgaacttttcaaaaattggtacatgctttagctttaaactacaggcctcactggagctagagacaagaaggtaaaaaacggctgacaaaagaagtcctggtatcctctatgatgggagaaggaaactagctaaagggaagaataaattagagaaaaactggaatgactgaatcggaacaaggcaaaggctataaaaaaaattagcagtatcctcttgggggccccttccccacactatctcaatgcaaatatctgtctgaaacggtccctggctaaactccacccatgggttggccagccttgccttgaccaatagccttgacaaggcaaacttgaccaatagtcttagagtatccagtgaggccaggggccggcggctggctagggatgaagaataaaaggaagcacccttcagcagttccacacactcgcttctggaacgtctgaggttatcaataagctcctagtccagacgccatgggtcatttcacagaggaggacaaggctactatcacaagcctgtggggcaaggtgaatgtggaagatgctggaggagaaaccctgggaaggtaggctctggtgaccaggacaagggagggaaggaaggaccctgtgcctggcaaaagtccaggtcgcttctcaggatttgtggcaccttctgactgtcaaactgttcttgtcaatctcacaggctcctggttgtctacccatggacccagaggttctttgacagctttggcaacctgtcctctgcctctgccatcatgggcaaccccaaagtcaaggcacatggcaagaaggtgctgacttccttgggagatgccacaaagcacctggatgatctcaagggcacctttgcccagctgagtgaactgcactgtgacaagctgcatgtggatcctgagaacttcaaggtgagtccaggagatgtttcagccctgttgcctttagtctcgaggcaacttagacaacggagtattgatctgagcacagcagggtgtgagctgtttgaagatactggggttgggggtgaagaaactgcagaggactaactgggctgagacccagtggtaatgttttagggcctaaggagtgcctctaaaaatctagatggacaattttgactttgagaaaagagaggtggaaatgaggaaaatgacttttctttattagattccagtagaaagaactttcatctttccctcatttttgttgttttaaaacatctatctggaggcaggacaagtatggtcgttaaaaagatgcaggcagaaggcatatattggctcagtcaaagtggggaactttggtggccaaacatacattgctaaggctattcctatatcagctggacacatataaaatgctgctaatgcttcattacaaacttatatcctttaattccagatgggggcaaagtatgtccaggggtgaggaacaattgaaacatttgggctggagtagattttgaaagtcagctctgtgtgtgtgtgtgtgtgtgcgcgcgcgcgtgtgtgtgtgtgtgtcagcgtgtgtttcttttaacgtcttcagcctacaacatacagggttcatggtggcaagaagatagcaagatttaaattatggccagtgactagtgcttgaaggggaacaactacctgcatttaatgggaaggcaaaatctcaggctttgagggaagttaacataggcttgattctgggtggaagcttggtgtgtagttatctggaggccaggctggagctctcagctcactatgggttcatctttattgtctcctttcatctcaacagctcctgggaaatgtgctggtgaccgttttggcaatccatttcggcaaagaattcacccctgaggtgcaggcttcctggcagaagatggtgactgcagtggccagtgccctgtcctccagataccactgagctcactgcccatgattcagagctttcaaggataggctttattctgcaagcaatacaaataataaatctattctgctgagagatcacacatgattttcttcagctcttttttttacatctttttaaatatatgagccacaaagggtttatattgagggaagtgtgtatgtgtatttctgcatgcctgtttgtgtttgtggtgtgtgcatgctcctcatttatttttatatgagatgtgcattttgatgagcaaataaaagcagtaaagacacttgtacacgggagttctgcaagtgggagtaaatggtgtaggagaaatccg

SEQ ID NO: 903 - DNA, 4773 bp, Homo sapiens
  misc_feature 1233..1238: note = GATA1 binding site
  misc_feature 2672..2677: note = GATA1 binding site
  misc_feature 2686..2691: note = GATA1 binding site
  misc_feature 2715..2723: note = FKLF transcription factor binding motif
  misc_feature 2747..2754: note = CP1/Coup TFII binding motif
  misc_feature 2748..2760: note = HPFH deletion site (13 bp del -114 to -102)
  misc_feature 2915..2917: note = Start codon
  source 1..4773: mol_type = other DNA
ttatgtcattaccagagttaaaattctataatggcttctcactccctaccactgaggacaagtttatgtccttaggtttatgcttccctgaaacaataccacctgctattctccactttacatatcaacggcactggttctttatctaactctctggcacagcaggagtttgttttcttctgcttcagagctttgaatttactatttcagcttctaaactttatttggcaatgccttcccatggcagattccttctgtcattttgcctctgttcgaatactttctccttaatttcattcttagttaataatatctgaaattattttgttgtttaacttaattattaattttatgtatgttctacctagattataatcttcagaggaaagttttattctctgacttatttaacttaaatgcccactactttaaaaattatgacatttatttaacagatatttgctgaacaaatgtttgaaaatacatgggaaagaatgcttgaaaacacttgaaattgcttgtgtaaagaaacagttttatcagttaggatttaatcaatgtcagaagcaatgatataggaaaaatcgaggaataagacagttatggataaggagaaatcaacaaactcttaaaagatattgcctcaaaagcataagaggaaataagggtttatacatgacttttagaacactgccttggtttttggataaatggggaagttgtttgaaaacaggagggatcctagatattccttagtctgaggaggagcaattaagattcacttgtttagaggctgggagtggtggctcacgcctgtaatcccagaattttgggaggccaaggcaggcagatcacctgaggtcaagagttcaagaccaacctggccaacatggtgaaatcccatctctacaaaaatacaaaaattagacaggcatgatggcaagtgcctgtaatcccagctacttgggaggctgaggaaggagaattgcttgaacctggaaggcaggagttgcagtgagccgagatcataccactgcactccagcctgggtgacagaacaagactctgtctcaaaaaaaaaaaagagagattcaaaagattcacttgtttaggccttagcgggcttagacaccagtctctgacacattcttaaaggtcaggctctacaaatggaacccaaccagactctcagatatggccaaagatctatacacacccatctcacagatcccctatcttaaagagaccctaatttgggttcacctcagtctctataatctgtaccagcataccaataaaaatctttctcacccatccttagattgagagaagtcacttattattatgtgagtaactggaagatactgataagttgacaaatctttttctttcctttcttattcaacttttattttaacttccaaagaacaagtgcaatatgtgcagctttgttgcgcaggtcaacatgtatctttctggtcttttagccgcctaacactttgagcagatataagccttacacaggattatgaagtctgaaaggattccaccaatattattataattcctatcaacctgataggttaggggaaggtagagctctcctccaataagccagatttccagagtttctgacgtcataatctaccaaggtcatggatcgagttcagagaaaaaacaaaagcaaaaccaaacctaccaaaaaataaaaatcccaaagaaaaaataaagaaaaaaacagcatgaatacttcctgccatgttaagtggccaatatgtcagaaacagcactgagttacagataaagatgtctaaactacagtgacatcccagctgtcacagtgtgtggactattagtcaataaaacagtccctgcctcttaagagttgttttccatgcaaatacatgtcttatgtcttagaataagattccctaagaagtgaacctagcatttatacaagataattaattctaatccatagtatctggtaaagagcattctaccatcatctttaccgagcatagaagagctacaccaaaaccctgggtcatcagccagcacatacacttatccagtgataaatacacatcatcgggtgcctacatacatacctgaatataaaaaaaatacttttgctgagatgaaacaggcgtgatttatttcaaataggtacggataagtagatattgaagtaaggattcagtcttatattatattacataacattaatctattcctgcactgaaactgttgctttataggatttttcactacactaatgagaacttaagagataatggcctaaaaccacagagagtatattcaaagataagtatagcacttcttatttggaaaccaatgcttactaaatgagactaagacgtgtcccatcaaaaatcctggacctatgcctaaaacacatttcacaatccctgaacttttcaaaaattggtacatgctttaactttaaactacaggcctcactggagctacagacaagaaggtgaaaaacggctgacaaaagaagtcctggtatcttctatggtgggagaagaaaactagctaaagggaagaataaattagagaaaaattggaatgactgaatcggaacaaggcaaaggctataaaaaaaattaagcagcagtatcctcttgggggccccttccccacactatctcaatgcaaatatctgtctgaaacggtccctggctaaactccacccatgggttggccagccttgccttgaccaatagccttgacaaggcaaacttgaccaatagtcttagagtatccagtgaggccaggggccggcggctggctagggatgaagaataaaaggaagcacccttcagcagttccacacactcgcttctggaacgtctgaggttatcaataagctcctagtccagacgccatgggtcatttcacagaggaggacaaggctactatcacaagcctgtggggcaaggtgaatgtggaagatgctggaggagaaaccctgggaaggtaggctctggtgaccaggacaagggagggaaggaaggaccctgtgcctggcaaaagtccaggtcgcttctcaggatttgtggcaccttctgactgtcaaactgttcttgtcaatctcacaggctcctggttgtctacccatggacccagaggttctttgacagctttggcaacctgtcctctgcctctgccatcatgggcaaccccaaagtcaaggcacatggcaagaaggtgctgacttccttgggagatgccataaagcacctggatgatctcaagggcacctttgcccagctgagtgaactgcactgtgacaagctgcatgtggatcctgagaacttcaaggtgagtccaggagatgtttcagcactgttgcctttagtctcgaggcaacttagacaactgagtattgatctgagcacagcagggtgtgagctgtttgaagatactggggttgggagtgaagaaactgcagaggactaactgggctgagacccagtggcaatgttttagggcctaaggagtgcctctgaaaatctagatggacaactttgactttgagaaaagagaggtggaaatgaggaaaatgacttttctttattagatttcggtagaaagaactttcacctttcccctatttttgttattcgttttaaaacatctatctggaggcaggacaagtatggtcattaaaaagatgcaggcagaaggcatatattggctcagtcaaagtggggaactttggtggccaaacatacattgctaaggctattcctatatcagctggacacatataaaatgctgctaatgcttcattacaaacttatatcctttaattccagatgggggcaaagtatgtccaggggtgaggaacaattgaaacatttgggctggagtagattttgaaagtcagctctgtgtgtgtgtgtgtgtgtgtgcgcgcgtgtgtttgtgtgtgtgtgagagcgtgtgtttcttttaacgttttcagcctacagcatacagggttcatggtggcaagaagataacaagatttaaattatggccagtgactagtgctgcaagaagaacaactacctgcatttaatgggaaagcaaaatctcaggctttgagggaagttaacataggcttgattctgggtggaagcttggtgtgtagttatctggaggccaggctggagctctcagctcactatgggttcatctttattgtctcctttcatctcaacagctcctgggaaatgtgctggtgaccgttttggcaatccatttcggcaaagaattcacccctgaggtgcaggcttcctggcagaagatggtgactggagtggccagtgccctgtcctccagataccactgagctcactgcccatgatgcagagctttcaaggataggctttattctgcaagcaatcaaataataaatctattctgctaagagatcacacatggttgtcttcagttctttttttatgtctttttaaatatatgagccacaaagggttttatgttgagggatgtgtttatgtgtatttatacatggctatgtgtgtttgtgtcatgtgcacactccacacttttttgtttacgttagatgtgggttttgatgagcaaataaaagaactaggcaataaagaaacttgtacatgggagttctgcaagtgggagtaaaaggtgcaggagaaatctggttggaagaaagacctctataggacaggactcctcagaaacagatgttttggaagagatggggaaaggttcagtgaa

SEQ ID NO: 904 - DNA, 87 bp, synthetic construct
  misc_feature 1..87: note = ssODN1 5' homology arm
  source 1..87: mol_type = other DNA
gggtgcttccttttattcttcatccctagccagccgccggcccctggcctcactggatactctaagactattggtcaagtttgcctt

SEQ ID NO: 905 - DNA, 89 bp, synthetic construct
  misc_feature 1..89: note = ssODN1 3' homology arm
  source 1..89: mol_type = other DNA
gtcaaggcaaggctggccaacccatgggtggagtttagccagggaccgtttcagacagatatttgcattgagatagtgtggggaagggg

SEQ ID NO: 906 - DNA, 176 bp, synthetic construct
  misc_feature 1..176: note = ssODN1
  source 1..176: mol_type = other DNA
gggtgcttccttttattcttcatccctagccagccgccggcccctggcctcactggatactctaagactattggtcaagtttgccttgtcaaggcaaggctggccaacccatgggtggagtttagccagggaccgtttcagacagatatttgcattgagatagtgtggggaagggg

SEQ ID NO: 907 - DNA, 87 bp, synthetic construct; identical to SEQ ID NO: 904
  misc_feature 1..87: note = PhTx ssODN1 5' homology arm
  misc_feature 1..2: note = Linked by phosphorothioate (PS) bond
  source 1..87: mol_type = other DNA

SEQ ID NO: 908 - DNA, 89 bp, synthetic construct; identical to SEQ ID NO: 905
  misc_feature 1..89: note = PhTx ssODN1 3' homology arm
  misc_feature 88..89: note = Linked by phosphorothioate (PS) bond
  source 1..89: mol_type = other DNA

SEQ ID NO: 909 - DNA, 176 bp, synthetic construct; identical to SEQ ID NO: 906
  misc_feature 1..176: note = PhTx ssODN1
  misc_feature 1..2: note = Linked by phosphorothioate (PS) bond
  misc_feature 175..176: note = Linked by phosphorothioate (PS) bond
  source 1..176: mol_type = other DNA

SEQ ID NO: 910 - DNA, 17 bp, synthetic construct
  misc_feature 1..17: note = targeting domain
  source 1..17: mol_type = other DNA
ggctattggtcaaggca

SEQ ID NO: 911 - DNA, 20 bp, synthetic construct
  misc_feature 1..20: note = targeting domain
  source 1..20: mol_type = other DNA
caaggctattggtcaaggca

SEQ ID NO: 912 - DNA, 17 bp, synthetic construct
  misc_feature 1..17: note = targeting domain
  source 1..17: mol_type = other DNA
tgccttgtcaaggctat

SEQ ID NO: 913 - DNA, 20 bp, synthetic construct
  misc_feature 1..20: note = targeting domain
  source 1..20: mol_type = other DNA
gtttgccttgtcaaggctat

SEQ ID NO: 914 - DNA, 17 bp, synthetic construct
  misc_feature 1..17: note = targeting domain
  source 1..17: mol_type = other DNA
gaccaatagccttgaca

SEQ ID NO: 915 - DNA, 20 bp, synthetic construct
  misc_feature 1..20: note = targeting domain
  source 1..20: mol_type = other DNA
cttgaccaatagccttgaca

SEQ ID NO: 916 - DNA, 17 bp, synthetic construct
  misc_feature 1..17: note = targeting domain
  source 1..17: mol_type = other DNA
gtcaaggctattggtca

SEQ ID NO: 917 - DNA, 20 bp, synthetic construct
  misc_feature 1..20: note = targeting domain
  source 1..20: mol_type = other DNA
cttgtcaaggctattggtca

SEQ ID NO: 918 - DNA, 17 bp, synthetic construct
  misc_feature 1..17: note = targeting domain
  source 1..17: mol_type = other DNA
tcaagtttgccttgtca

SEQ ID NO: 919 - DNA, 20 bp, synthetic construct
  misc_feature 1..20: note = targeting domain
  source 1..20: mol_type = other DNA
tggtcaagtttgccttgtca

SEQ ID NO: 920 - RNA, 20 nt, synthetic construct
  misc_feature 1..20: note = targeting domain plus PAM (NGG)
  source 1..20: mol_type = other RNA
ggctattggtcaaggcaagg

SEQ ID NO: 921 - RNA, 23 nt, synthetic construct
  misc_feature 1..23: note = targeting domain plus PAM (NGG)
  source 1..23: mol_type = other RNA
caaggctattggtcaaggcaagg

SEQ ID NO: 922 - RNA, 20 nt, synthetic construct
  misc_feature 1..20: note = targeting domain plus PAM (NGG)
  source 1..20: mol_type = other RNA
tgccttgtcaaggctattgg

SEQ ID NO: 923 - RNA, 23 nt, synthetic construct
  misc_feature 1..23: note = targeting domain plus PAM (NGG)
  source 1..23: mol_type = other RNA
gtttgccttgtcaaggctattgg

SEQ ID NO: 924 - RNA, 20 nt, synthetic construct
  misc_feature 1..20: note = targeting domain plus PAM (NGG)
  source 1..20: mol_type = other RNA
gaccaatagccttgacaagg

SEQ ID NO: 925 - RNA, 23 nt, synthetic construct
  misc_feature 1..23: note = targeting domain plus PAM (NGG)
  source 1..23: mol_type = other RNA
cttgaccaatagccttgacaagg

SEQ ID NO: 926 - RNA, 20 nt, synthetic construct
  misc_feature 1..20: note = targeting domain plus PAM (NGG)
  source 1..20: mol_type = other RNA
gtcaaggctattggtcaagg

SEQ ID NO: 927 - RNA, 23 nt, synthetic construct
  misc_feature 1..23: note = targeting domain plus PAM (NGG)
  source 1..23: mol_type = other RNA
cttgtcaaggctattggtcaagg

SEQ ID NO: 928 - RNA, 20 nt, synthetic construct
  misc_feature 1..20: note = targeting domain plus PAM (NGG)
  source 1..20: mol_type = other RNA
tcaagtttgccttgtcaagg

SEQ ID NO: 929 - RNA, 23 nt, synthetic construct
  misc_feature 1..23: note = targeting domain plus PAM (NGG)
  source 1..23: mol_type = other RNA
tggtcaagtttgccttgtcaagg

SEQ ID NO: 930 - DNA, 20 bp, synthetic construct
  misc_feature 1..20: note = targeting domain plus PAM (NGG)
  source 1..20: mol_type = other DNA
ggctattggtcaaggcaagg

SEQ ID NO: 931 - DNA, 23 bp, synthetic construct
  misc_feature 1..23: note = targeting domain plus PAM (NGG)
  source 1..23: mol_type = other DNA
caaggctattggtcaaggcaagg

SEQ ID NO: 932 - DNA, 20 bp, synthetic construct
  misc_feature 1..20: note = targeting domain plus PAM (NGG)
  source 1..20: mol_type = other DNA
tgccttgtcaaggctattgg

SEQ ID NO: 933 - DNA, 23 bp, synthetic construct
  misc_feature 1..23: note = targeting domain plus PAM (NGG)
  source 1..23: mol_type = other DNA
gtttgccttgtcaaggctattgg

SEQ ID NO: 934 - DNA, 20 bp, synthetic construct
  misc_feature 1..20: note = targeting domain plus PAM (NGG)
  source 1..20: mol_type = other DNA
gaccaatagccttgacaagg

SEQ ID NO: 935 - DNA, 23 bp, synthetic construct
  misc_feature 1..23: note = targeting domain plus PAM (NGG)
  source 1..23: mol_type = other DNA
cttgaccaatagccttgacaagg

SEQ ID NO: 936 - DNA, 20 bp, synthetic construct
  misc_feature 1..20: note = targeting domain plus PAM (NGG)
  source 1..20: mol_type = other DNA
gtcaaggctattggtcaagg

SEQ ID NO: 937 - DNA, 23 bp, synthetic construct
  misc_feature 1..23: note = targeting domain plus PAM (NGG)
  source 1..23: mol_type = other DNA
cttgtcaaggctattggtcaagg

SEQ ID NO: 938 - DNA, 20 bp, synthetic construct
  misc_feature 1..20: note = targeting domain plus PAM (NGG)
  source 1..20: mol_type = other DNA
tcaagtttgccttgtcaagg

SEQ ID NO: 939 - DNA, 23 bp, synthetic construct
  misc_feature 1..23: note = targeting domain plus PAM (NGG)
  source 1..23: mol_type = other DNA
tggtcaagtttgccttgtcaagg

SEQ ID NO: 940 - RNA, 17 nt, synthetic construct
  misc_feature 1..17: note = targeting domain
  source 1..17: mol_type = other RNA
agtatccagtgaggcca

SEQ ID NO: 941 - RNA, 20 nt, synthetic construct
  misc_feature 1..20: note = targeting domain
  source 1..20: mol_type = other RNA
ggcaaggctggccaacccat

SEQ ID NO: 942 - RNA, 20 nt, synthetic construct
  misc_feature 1..20: note = targeting domain
  source 1..20: mol_type = other RNA
tatttgcattgagatagtgt

SEQ ID NO: 943 - DNA, 17 bp, synthetic construct
  misc_feature 1..17: note = targeting domain
  source 1..17: mol_type = other DNA
agtatccagtgaggcca

SEQ ID NO: 944 - DNA, 20 bp, synthetic construct
  misc_feature 1..20: note = targeting domain
  source 1..20: mol_type = other DNA
ggcaaggctggccaacccat

SEQ ID NO: 945 - DNA, 20 bp, synthetic construct
  misc_feature 1..20: note = targeting domain
  source 1..20: mol_type = other DNA
tatttgcattgagatagtgt

SEQ ID NO: 946 - RNA, 20 nt, synthetic construct
  misc_feature 1..20: note = targeting domain plus PAM (NGG)
  source 1..20: mol_type = other RNA
agtatccagtgaggccaggg

SEQ ID NO: 947 - RNA, 23 nt, synthetic construct
  misc_feature 1..23: note = targeting domain plus PAM (NGG)
  source 1..23: mol_type = other RNA
ggcaaggctggccaacccatggg

SEQ ID NO: 948 - RNA, 23 nt, synthetic construct
  misc_feature 1..23: note = targeting domain plus PAM (NGG)
  source 1..23: mol_type = other RNA
tatttgcattgagatagtgtggg

SEQ ID NO: 949 - DNA, 20 bp, synthetic construct
  misc_feature 1..20: note = targeting domain plus PAM (NGG)
  source 1..20: mol_type = other DNA
agtatccagtgaggccaggg

SEQ ID NO: 950 - DNA, 23 bp, synthetic construct
  misc_feature 1..23: note = targeting domain plus PAM (NGG)
  source 1..23: mol_type = other DNA
ggcaaggctggccaacccatggg

SEQ ID NO: 951 - DNA, 23 bp, synthetic construct
  misc_feature 1..23: note = targeting domain plus PAM (NGG)
  source 1..23: mol_type = other DNA
tatttgcattgagatagtgtggg

SEQ ID NO: 952 - RNA, 20 nt, synthetic construct
  misc_feature 1..20: note = targeting domain
  source 1..20: mol_type = other RNA
ctaacagttgcttttatcac

SEQ ID NO: 953 - RNA, 20 nt, synthetic construct
  misc_feature 1..20: note = targeting domain
  source 1..20: mol_type = other RNA
gggcgtgggtggggtagaag

SEQ ID NO: 954 - RNA, 20 nt, synthetic construct
  misc_feature 1..20: note = targeting domain
  source 1..20: mol_type = other RNA
ctcttagacataacacacca

SEQ ID NO: 955 - RNA, 20 nt, synthetic construct
  misc_feature 1..20: note = targeting domain
  source 1..20: mol_type = other RNA
atcagaggccaaacccttcc

SEQ ID NO: 956 - DNA, 20 bp, synthetic construct
  misc_feature 1..20: note = targeting domain
  source 1..20: mol_type = other DNA
ctaacagttgcttttatcac

SEQ ID NO: 957 - DNA, 20 bp, synthetic construct
  misc_feature 1..20: note = targeting domain
  source 1..20: mol_type = other DNA
gggcgtgggtggggtagaag

SEQ ID NO: 958 - DNA, 20 bp, synthetic construct
  misc_feature 1..20: note = targeting domain
  source 1..20: mol_type = other DNA
ctcttagacataacacacca

SEQ ID NO: 959 - DNA, 20 bp, synthetic construct
  misc_feature 1..20: note = targeting domain
  source 1..20: mol_type = other DNA
atcagaggccaaacccttcc

SEQ ID NO: 960 - RNA, 23 nt, synthetic construct
  misc_feature 1..23: note = targeting domain plus PAM (NGG)
  source 1..23: mol_type = other RNA
ctaacagttgcttttatcacagg

SEQ ID NO: 961 - RNA, 23 nt, synthetic construct
  misc_feature 1..23: note = targeting domain plus PAM (NGG)
  source 1..23: mol_type = other RNA
gggcgtgggtggggtagaagagg

SEQ ID NO: 962 - RNA, 23 nt, synthetic construct
  misc_feature 1..23: note = targeting domain plus PAM (NGG)
  source 1..23: mol_type = other RNA
ctcttagacataacacaccaggg

SEQ ID NO: 963 - RNA, 23 nt, synthetic construct
  misc_feature 1..23: note = targeting domain plus PAM (NGG)
  source 1..23: mol_type = other RNA
atcagaggccaaacccttcctgg

SEQ ID NO: 964 - DNA, 23 bp, synthetic construct
  misc_feature 1..23: note = targeting domain plus PAM (NGG)
  source 1..23: mol_type = other DNA
ctaacagttgcttttatcacagg

SEQ ID NO: 965 - DNA, 23 bp, synthetic construct
  misc_feature 1..23: note = targeting domain plus PAM (NGG)
  source 1..23: mol_type = other DNA
gggcgtgggtggggtagaagagg

SEQ ID NO: 966 - DNA, 23 bp, synthetic construct
  misc_feature 1..23: note = targeting domain plus PAM (NGG)
  source 1..23: mol_type = other DNA
ctcttagacataacacaccaggg

SEQ ID NO: 967 - DNA, 23 bp, synthetic construct
  misc_feature 1..23: note = targeting domain plus PAM (NGG)
  source 1..23: mol_type = other DNA
atcagaggccaaacccttcctgg

SEQ ID NO: 968 - DNA, 115 bp, synthetic construct
  misc_feature 1..115: note = +58 DHS enhancer
  source 1..115: mol_type = other DNA
caactttgaagctagtctagtgcaagctaacagttgcttttatcacaggctccaggaagggtttggcctctgattagggtgggggcgtgggtggggtagaagaggactggcagac

SEQ ID NO: 969 - DNA, 801 bp, synthetic construct
  misc_feature 1..801: note = +58 DHS enhancer region including ~500 bp upstream and ~200 bp downstream
  source 1..801: mol_type = other DNA
aggtaccttttgtgtgtatgtgctgattgagggcccattgagaatattttgacttttagggaagctccaaactctcaaaccacagggatcacaacacatacgtgtgtctgttatgacgttatatgtaagcatcacaacaggcagagaatgtctgcaccccaccctggaaaacagcctgactgtgccccatgggcaaaccagactagtttatagggggttctactctgaggtactgatggaccttgggtgctattcctgtgataaggaaggcagctagacaggacttgggagttatctgtagtgagatggctgaaaagcgatacagggctggctctatgccccaggtgtgcataagtaagagcagatagctgattccagtgcaaagtccatacaggtaataacataggccagaaaagagatatggcatctactcttagacataacacaccagggtcaatacaactttgaagctagtctagtgcaagctaacagttgcttttatcacaggctccaggaagggtttggcctctgattagggtgggggcgtgggtggggtagaagaggactggcagacctctccatcggtggccgtttgcccaggggggcctctttcggaaggctctcttggtgatggagaattggattttatttctcaatgggaatgaaataatttgtatgccatgccgtgtggactcccaaaattgtaaaggaggtgaagcttcccctgtctgcactctcccctcctcataattgtccatttttcatctgtcgggctgtccacccatccatcacatataggca

SEQ ID NO: 970 - RNA, 100 nt, synthetic construct
  misc_feature 1..100: note = Unmodified Sp35 gRNA (OLI7066)
  source 1..100: mol_type = other RNA
cttgtcaaggctattggtcagttttagagctagaaatagcaagttaaaataaggctagtccgttatcaacttgaaaaagtggcaccgagtcggtgctttt

SEQ ID NO: 971 - RNA, 100 nt, synthetic construct; identical to SEQ ID NO: 970
  misc_feature 1..100: note = Sp35 gRNA w/ 5' and 3' PS/OMe (OLI8394)
  misc_feature 1: note = Modified to contain 2'-O-methyl
  misc_feature 1..2: note = Linked by phosphorothioate (PS) bond
  misc_feature 2..3: note = Linked by phosphorothioate (PS) bond
  misc_feature 2: note = Modified to contain 2'-O-methyl
  misc_feature 3..4: note = Linked by phosphorothioate (PS) bond
  misc_feature 3: note = Modified to contain 2'-O-methyl
  misc_feature 97..98: note = Linked by phosphorothioate (PS) bond
  misc_feature 97: note = Modified to contain 2'-O-methyl
  misc_feature 98..99: note = Linked by phosphorothioate (PS) bond
  misc_feature 98: note = Modified to contain 2'-O-methyl
  misc_feature 99..100: note = Linked by phosphorothioate (PS) bond
  misc_feature 99: note = Modified to contain 2'-O-methyl
  source 1..100: mol_type = other RNA

SEQ ID NO: 972 - DNA, 100 bp, synthetic construct
  misc_feature 1..100: note = Unmodified Sp35 gRNA (OLI7066)
  source 1..100: mol_type = other DNA
cttgtcaaggctattggtcagttttagagctagaaatagcaagttaaaataaggctagtccgttatcaacttgaaaaagtggcaccgagtcggtgctttt

SEQ ID NO: 973 - DNA, 100 bp, synthetic construct; identical to SEQ ID NO: 972
  misc_feature 1..100: note = Sp35 gRNA w/ 5' and 3' PS/OMe (OLI8394)
  misc_feature 1: note = Modified to contain 2'-O-methyl
  misc_feature 1..2: note = Linked by phosphorothioate (PS) bond
  misc_feature 2: note = Modified to contain 2'-O-methyl
  misc_feature 2..3: note = Linked by phosphorothioate (PS) bond
  misc_feature 3: note = Modified to contain 2'-O-methyl
  misc_feature 3..4: note = Linked by phosphorothioate (PS) bond
  misc_feature 97: note = Modified to contain 2'-O-methyl
  misc_feature 97..98: note = Linked by phosphorothioate (PS) bond
  misc_feature 98: note = Modified to contain 2'-O-methyl
  misc_feature 98..99: note = Linked by phosphorothioate (PS) bond
  misc_feature 99: note = Modified to contain 2'-O-methyl
  misc_feature 99..100: note = Linked by phosphorothioate (PS) bond
  source 1..100: mol_type = other DNA

SEQ ID NO: 974 - DNA, 180 bp, synthetic construct
  misc_feature 1..180: note = Ptx ssODN 18nt - positive strand (OLI16409)
  misc_feature 1..2: note = Linked by phosphorothioate (PS) bond
  misc_feature 179..180: note = Linked by phosphorothioate (PS) bond
  source 1..180: mol_type = other DNA
ggtgcttccttttattcttcatccctagccagccgccggcccctggcctcactggatactctaagactattggtcaagtttgccttgtcaaggctggccaacccatgggtggagtttagccagggaccgtttcagacagatatttgcattgagatagtgtggggaaggggcccccaagag

SEQ ID NO: 975 - DNA, 180 bp, synthetic construct
  misc_feature 1..180: note = Ptx ssODN 18nt - negative strand (OLI16410)
  misc_feature 1..2: note = Linked by phosphorothioate (PS) bond
  misc_feature 179..180: note = Linked by phosphorothioate (PS) bond
  source 1..180: mol_type = other DNA
ctcttgggggccccttccccacactatctcaatgcaaatatctgtctgaaacggtccctggctaaactccacccatgggttggccagccttgacaaggcaaacttgaccaatagtcttagagtatccagtgaggccaggggccggcggctggctagggatgaagaataaaaggaagcacc

SEQ ID NO: 976 - DNA, 180 bp, synthetic construct
  misc_feature 1..180: note = Ptx ssODN 11nt - negative strand (OLI16411)
  misc_feature 1..2: note = Linked by phosphorothioate (PS) bond
  misc_feature 179..180: note = Linked by phosphorothioate (PS) bond
  source 1..180: mol_type = other DNA
ggccccttccccacactatctcaatgcaaatatctgtctgaaacggtccctggctaaactccacccatgggttggccagccttgccttgagacaaggcaaacttgaccaatagtcttagagtatccagtgaggccaggggccggcggctggctagggatgaagaataaaaggaagcaccc

SEQ ID NO: 977 - DNA, 180 bp, synthetic construct
  misc_feature 1..180: note = Ptx ssODN 13nt - negative strand (OLI16412)
  misc_feature 1..2: note = Linked by phosphorothioate (PS) bond
  misc_feature 179..180: note = Linked by phosphorothioate (PS) bond
  source 1..180: mol_type = other DNA
ggccccttccccacactatctcaatgcaaatatctgtctgaaacggtccctggctaaactccacccatgggttggccagccttgccttgacaaggcaaacttgaccaatagtcttagagtatccagtgaggccaggggccggcggctggctagggatgaagaataaaaggaagcaccctt

SEQ ID NO: 978 - DNA, 180 bp, synthetic construct
  misc_feature 1..180: note = Ptx ssODN 11nt - positive strand (OLI16413)
  misc_feature 1..2: note = Linked by phosphorothioate (PS) bond
  misc_feature 179..180: note = Linked by phosphorothioate (PS) bond
  source 1..180: mol_type = other DNA
gggtgcttccttttattcttcatccctagccagccgccggcccctggcctcactggatactctaagactattggtcaagtttgccttgtctcaaggcaaggctggccaacccatgggtggagtttagccagggaccgtttcagacagatatttgcattgagatagtgtggggaaggggcc

SEQ ID NO: 979 - DNA, 180 bp, synthetic construct
  misc_feature 1..180: note = Ptx ssODN 13nt - positive strand (OLI16414)
  misc_feature 1..2: note = Linked by phosphorothioate (PS) bond
  misc_feature 179..180: note = Linked by phosphorothioate (PS) bond
  source 1..180: mol_type = other DNA
aagggtgcttccttttattcttcatccctagccagccgccggcccctggcctcactggatactctaagactattggtcaagtttgccttgtcaaggcaaggctggccaacccatgggtggagtttagccagggaccgtttcagacagatatttgcattgagatagtgtggggaaggggcc

SEQ ID NO: 980 - DNA, 180 bp, synthetic construct
  misc_feature 1..180: note = Ptx ssODN 117G>A - negative strand (OLI16415)
  misc_feature 1..2: note = Linked by phosphorothioate (PS) bond
  misc_feature 179..180: note = Linked by phosphorothioate (PS) bond
  source 1..180: mol_type = other DNA
ggccccttccccacactatctcaatgcaaatatctgtctgaaacggtccctggctaaactccacccatgggttggccagccttgccttaaccaatagccttgacaaggcaaacttgaccaatagtcttagagtatccagtgaggccaggggccggcggctggctagggatgaagaataaa

SEQ ID NO: 981 - DNA, 180 bp, synthetic construct
  misc_feature 1..180: note = Ptx ssODN 117G>A - positive strand (OLI16416)
  misc_feature 1..2: note = Linked by phosphorothioate (PS) bond
  misc_feature 179..180: note = Linked by phosphorothioate (PS) bond
  source 1..180: mol_type = other DNA
tttattcttcatccctagccagccgccggcccctggcctcactggatactctaagactattggtcaagtttgccttgtcaaggctattggttaaggcaaggctggccaacccatgggtggagtttagccagggaccgtttcagacagatatttgcattgagatagtgtggggaaggggcc

SEQ ID NO: 982 - DNA, 180 bp, synthetic construct
  misc_feature 1..180: note = Ptx ssODN 1nt - negative strand (OLI16417)
  misc_feature 1..2: note = Linked by phosphorothioate (PS) bond
  misc_feature 179..180: note = Linked by phosphorothioate (PS) bond
  source 1..180: mol_type = other DNA
ggccccttccccacactatctcaatgcaaatatctgtctgaaacggtccctggctaaactccacccatgggttggccagccttgccttgccaatagccttgacaaggcaaacttgaccaatagtcttagagtatccagtgaggccaggggccggcggctggctagggatgaagaataaaa

SEQ ID NO: 983 - DNA, 180 bp, synthetic construct
  misc_feature 1..180: note = Ptx ssODN 1nt - positive strand (OLI16418)
  misc_feature 1..2: note = Linked by phosphorothioate (PS) bond
  misc_feature 179..180: note = Linked by phosphorothioate (PS) bond
  source 1..180: mol_type = other DNA
ttttattcttcatccctagccagccgccggcccctggcctcactggatactctaagactattggtcaagtttgccttgtcaaggctattggcaaggcaaggctggccaacccatgggtggagtttagccagggaccgtttcagacagatatttgcattgagatagtgtggggaaggggcc

SEQ ID NO: 984 - DNA, 120 bp, synthetic construct
  misc_feature 1..120: note = Ptx ssODN 4nt 40/80 - negative strand (OLI16419)
  misc_feature 1..2: note = Linked by phosphorothioate (PS) bond
  misc_feature 119..120: note = Linked by phosphorothioate (PS) bond
  source 1..120: mol_type = other DNA
tggctaaactccacccatgggttggccagccttgccttgatagccttgacaaggcaaacttgaccaatagtcttagagtatccagtgaggccaggggccggcggctggctagggatgaag

SEQ ID NO: 985 - DNA, 100 bp, synthetic construct
  misc_feature 1..100: note = Ptx ssODN 4nt 30/70 - negative strand (OLI16420)
  misc_feature 1..2: note = Linked by phosphorothioate (PS) bond
  misc_feature 99..100: note = Linked by phosphorothioate (PS) bond
  source 1..100: mol_type = other DNA
ccacccatgggttggccagccttgccttgatagccttgacaaggcaaacttgaccaatagtcttagagtatccagtgaggccaggggccggcggctggct

SEQ ID NO: 986 - DNA, 100 bp, synthetic construct
  misc_feature 1..100: note = Ptx ssODN 4nt - negative strand (OLI16421)
  misc_feature 1..2: note = Linked by phosphorothioate (PS) bond
  misc_feature 99..100: note = Linked by phosphorothioate (PS) bond
  source 1..100: mol_type = other DNA
aaacggtccctggctaaactccacccatgggttggccagccttgccttgatagccttgacaaggcaaacttgaccaatagtcttagagtatccagtgagg

SEQ ID NO: 987 - DNA, 120 bp, synthetic construct
  misc_feature 1..120: note = Ptx ssODN 4nt - negative strand (OLI16422)
  misc_feature 1..2: note = Linked by phosphorothioate (PS) bond
  misc_feature 119..120: note = Linked by phosphorothioate (PS) bond
  source 1..120: mol_type = other DNA
tatctgtctgaaacggtccctggctaaactccacccatgggttggccagccttgccttgatagccttgacaaggcaaacttgaccaatagtcttagagtatccagtgaggccaggggccg

SEQ ID NO: 988 - DNA, 140 bp, synthetic construct
  misc_feature 1..140: note = Ptx ssODN 4nt - negative strand (OLI16423)
  misc_feature 1..2: note = Linked by phosphorothioate (PS) bond
  misc_feature 139..140: note = Linked by phosphorothioate (PS) bond
  source 1..140: mol_type = other DNA
tcaatgcaaatatctgtctgaaacggtccctggctaaactccacccatgggttggccagccttgccttgatagccttgacaaggcaaacttgaccaatagtcttagagtatccagtgaggccaggggccggcggctggct

SEQ ID NO: 989 - DNA, 180 bp, synthetic construct
  misc_feature 1..180: note = Ptx ssODN 4nt - negative strand (OLI16424)
  misc_feature 1..2: note = Linked by phosphorothioate (PS) bond
  misc_feature 179..180: note = Linked by phosphorothioate (PS) bond
  source 1..180: mol_type = other DNA
ggccccttccccacactatctcaatgcaaatatctgtctgaaacggtccctggctaaactccacccatgggttggccagccttgccttgatagccttgacaaggcaaacttgaccaatagtcttagagtatccagtgaggccaggggccggcggctggctagggatgaagaataaaagga

SEQ ID NO: 990 - DNA, 120 bp, synthetic construct
  misc_feature 1..120: note = Ptx ssODN 4nt 40/80 - positive strand (OLI16425)
  misc_feature 1..2: note = Linked by phosphorothioate (PS) bond
  misc_feature 119..120: note = Linked by phosphorothioate (PS) bond
  source 1..120: mol_type = other DNA
tactctaagactattggtcaagtttgccttgtcaaggctatcaaggcaaggctggccaacccatgggtggagtttagccagggaccgtttcagacagatatttgcattgagatagtgtgg

SEQ ID NO: 991 - DNA, 100 bp, synthetic construct
  misc_feature 1..100: note = Ptx ssODN 4nt 30/70 - positive strand (OLI16426)
  misc_feature 1..2: note = Linked by phosphorothioate (PS) bond
  misc_feature 99..100: note = Linked by phosphorothioate (PS) bond
  source 1..100: mol_type = other DNA
ctattggtcaagtttgccttgtcaaggctatcaaggcaaggctggccaacccatgggtggagtttagccagggaccgtttcagacagatatttgcattga

SEQ ID NO: 992 - DNA, 100 bp, synthetic construct
  misc_feature 1..100: note = Ptx ssODN 4nt - positive strand (OLI16427)
  misc_feature 1..2: note = Linked by phosphorothioate (PS) bond
  misc_feature 99..100: note = Linked by phosphorothioate (PS) bond
  source 1..100: mol_type = other DNA
cctcactggatactctaagactattggtcaagtttgccttgtcaaggctatcaaggcaaggctggccaacccatgggtggagtttagccagggaccgttt

SEQ ID NO: 993 - DNA, 120 bp, synthetic construct
  misc_feature 1..120: note = Ptx ssODN 4nt - positive strand (OLI16428)
  misc_feature 1..2: note = Linked by phosphorothioate (PS) bond
  misc_feature 119..120: note = Linked by phosphorothioate (PS) bond
  source 1..120: mol_type = other DNA
cggcccctggcctcactggatactctaagactattggtcaagtttgccttgtcaaggctatcaaggcaaggctggccaacccatgggtggagtttagccagggaccgtttcagacagata

SEQ ID NO: 994 - DNA, 140 bp, synthetic construct
  misc_feature 1..140: note = Ptx ssODN 4nt - positive strand (OLI16429)
  misc_feature 1..2: note = Linked by phosphorothioate (PS) bond
  misc_feature 139..140: note = Linked by phosphorothioate (PS) bond
  source 1..140: mol_type = other DNA
agccagccgccggcccctggcctcactggatactctaagactattggtcaagtttgccttgtcaaggctatcaaggcaaggctggccaacccatgggtggagtttagccagggaccgtttcagacagatatttgcattga

SEQ ID NO: 995 - DNA, 180 bp, synthetic construct
  misc_feature 1..180: note = Ptx ssODN 4nt - positive strand (OLI16430)
  misc_feature 1..2: note = Linked by phosphorothioate (PS) bond
  misc_feature 179..180: note = Linked by phosphorothioate (PS) bond
  source 1..180: mol_type = other DNA
tccttttattcttcatccctagccagccgccggcccctggcctcactggatactctaagactattggtcaagtttgccttgtcaaggctatcaaggcaaggctggccaacccatgggtggagtttagccagggaccgtttcagacagatatttgcattgagatagtgtggggaaggggcc

SEQ ID NO: 996 - RNA, 100 nt, synthetic construct
  misc_feature 1..100: note = Sp37 gRNA (OLI17075)
  source 1..100: mol_type = other RNA
cttgaccaatagccttgacagttttagagctagaaatagcaagttaaaataaggctagtccgttatcaacttgaaaaagtggcaccgagtcggtgctttt

SEQ ID NO: 997 - RNA, 100 nt, synthetic construct
  misc_feature 1..100: note = SpA gRNA (OLI17074)
  source 1..100: mol_type = other RNA
ggcaaggctggccaacccatgttttagagctagaaatagcaagttaaaataaggctagtccgttatcaacttgaaaaagtggcaccgagtcggtgctttt

SEQ ID NO: 998 - DNA, 100 bp, synthetic construct
  misc_feature 1..100: note = Sp37 gRNA (OLI17075)
  source 1..100: mol_type = other DNA
cttgaccaatagccttgacagttttagagctagaaatagcaagttaaaataaggctagtccgttatcaacttgaaaaagtggcaccgagtcggtgctttt

SEQ ID NO: 999 - DNA, 100 bp, synthetic construct
  misc_feature 1..100: note = SpA gRNA (OLI17074)
  source 1..100: mol_type = other DNA
ggcaaggctggccaacccatgttttagagctagaaatagcaagttaaaataaggctagtccgttatcaacttgaaaaagtggcaccgagtcggtgctttt

SEQ ID NO: 1000 - protein, 1332 aa, synthetic construct
  REGION 1..1332: note = His-AsCpf1-nNLS
MKHHHHHHMTQFEGFTNLYQVSKTLRFELIPQGKTLKHIQEQGFIEEDKARNDHYKELKPIIDRIYKTYADQCLQLVQLDWENLSAAIDSYRKEKTEETRNALIEEQATYRNAIHDYFIGRTDNLTDAINKRHAEIYKGLFKAELFNGKVLKQLGTVTTTEHENALLRSFDKFTTYFSGFYENRKNVFSAEDISTAIPHRIVQDNFPKFKENCHIFTRLITAVPSLREHFENVKKAIGIFVSTSIEEVFSFPFYNQLLTQTQIDLYNQLLGGISREAGTEKIKGLNEVLNLAIQKNDETAHIIASLPHRFIPLFKQILSDRNTLSFILEEFKSDEEVIQSFCKYKTLLRNENVLETAEALFNELNSIDLTHIFISHKKLETISSALCDHWDTLRNALYERRISELTGKITKSAKEKVQRSLKHEDINLQEIISAAGKELSEAFKQKTSEILSHAHAALDQPLPTTLKKQEEKEILKSQLDSLLGLYHLLDWFAVDESNEVDPEFSARLTGIKLEMEPSLSFYNKARNYATKKPYSVEKFKLNFQMPTLASGWDVNKEKNNGAILFVKNGLYYLGIMPKQKGRYKALSFEPTEKTSEGFDKMYYDYFPDAAKMIPKCSTQLKAVTAHFQTHTTPILLSNNFIEPLEITKEIYDLNNPEKEPKKFQTAYAKKTGDQKGYREALCKWIDFTRDFLSKYTKTTSIDLSSLRPSSQYKDLGEYYAELNPLLYHISFQRIAEKEIMDAVETGKLYLFQIYNKDFAKGHHGKPNLHTLYWTGLFSPENLAKTSIKLNGQAELFYRPKSRMKRMAHRLGEKMLNKKLKDQKTPIPDTLYQELYDYVNHRLSHDLSDEARALLPNVITKEVSHEIIKDRRFTSDKFFFHVPITLNYQAANSPSKFNQRVNAYLKEHPETPIIGIDRGERNLIYITVIDSTGKILEQRSLNTIQQFDYQKKLDNREKERVAARQAWSVVGTIKDLKQGYLSQVIHEIVDLMIHYQAVVVLENLNFGFKSKRTGIAEKAVYQQFEKMLIDKLNCLVLKDYPAEKVGGVLNPYQLTDQFTSFAKMGTQSGFLFYVPAPYTSKIDPLTGFVDPFVWKTIKNHESRKHFLEGFDFLHYDVKTGDFILHFKMNRNLSFQRGLPGFMPAWDIVFEKNETQFDAKGTPFIAGKRIVPVIENHRFTGRYRDLYPANELIALLEEKGIVFRDGSNILPKLLENDDSHAIDTMVALIRSVLQMRNSNAATGEDYINSPVRDLNGVCFDSRFQNPEWPMDADANGAYHIALKGQLLLNHLKESKDLKLQNGISNQDWLAYIQELRNKRPAATKKAGQAKKKKG

SEQ ID NO: 1001 - protein, 1333 aa, synthetic construct
  REGION 1..1333: note = His-AsCpf1-sNLS-sNLS
MKHHHHHHMTQFEGFTNLYQVSKTLRFELIPQGKTLKHIQEQGFIEEDKARNDHYKELKPIIDRIYKTYADQCLQLVQLDWENLSAAIDSYRKEKTEETRNALIEEQATYRNAIHDYFIGRTDNLTDAINKRHAEIYKGLFKAELFNGKVLKQLGTVTTTEHENALLRSFDKFTTYFSGFYENRKNVFSAEDISTAIPHRIVQDNFPKFKENCHIFTRLITAVPSLREHFENVKKAIGIFVSTSIEEVFSFPFYNQLLTQTQIDLYNQLLGGISREAGTEKIKGLNEVLNLAIQKNDETAHIIASLPHRFIPLFKQILSDRNTLSFILEEFKSDEEVIQSFCKYKTLLRNENVLETAEALFNELNSIDLTHIFISHKKLETISSALCDHWDTLRNALYERRISELTGKITKSAKEKVQRSLKHEDINLQEIISAAGKELSEAFKQKTSEILSHAHAALDQPLPTTLKKQEEKEILKSQLDSLLGLYHLLDWFAVDESNEVDPEFSARLTGIKLEMEPSLSFYNKARNYATKKPYSVEKFKLNFQMPTLASGWDVNKEKNNGAILFVKNGLYYLGIMPKQKGRYKALSFEPTEKTSEGFDKMYYDYFPDAAKMIPKCSTQLKAVTAHFQTHTTPILLSNNFIEPLEITKEIYDLNNPEKEPKKFQTAYAKKTGDQKGYREALCKWIDFTRDFLSKYTKTTSIDLSSLRPSSQYKDLGEYYAELNPLLYHISFQRIAEKEIMDAVETGKLYLFQIYNKDFAKGHHGKPNLHTLYWTGLFSPENLAKTSIKLNGQAELFYRPKSRMKRMAHRLGEKMLNKKLKDQKTPIPDTLYQELYDYVNHRLSHDLSDEARALLPNVITKEVSHEIIKDRRFTSDKFFFHVPITLNYQAANSPSKFNQRVNAYLKEHPETPIIGIDRGERNLIYITVIDSTGKILEQRSLNTIQQFDYQKKLDNREKERVAARQAWSVVGTIKDLKQGYLSQVIHEIVDLMIHYQAVVVLENLNFGFKSKRTGIAEKAVYQQFEKMLIDKLNCLVLKDYPAEKVGGVLNPYQLTDQFTSFAKMGTQSGFLFYVPAPYTSKIDPLTGFVDPFVWKTIKNHESRKHFLEGFDFLHYDVKTGDFILHFKMNRNLSFQRGLPGFMPAWDIVFEKNETQFDAKGTPFIAGKRIVPVIENHRFTGRYRDLYPANELIALLEEKGIVFRDGSNILPKLLENDDSHAIDTMVALIRSVLQMRNSNAATGEDYINSPVRDLNGVCFDSRFQNPEWPMDADANGAYHIALKGQLLLNHLKESKDLKLQNGISNQDWLAYIQELRNGSPKKKRKVGSPKKKRKV

SEQ ID NO: 1002 - RNA, 20 nt, synthetic construct
  misc_feature 1..20: note = HBG1-1 gRNA (OLI13620) targeting domain
  source 1..20: mol_type = other RNA
ccttgtcaaggctattggtc

SEQ ID NO: 1003 - DNA, 20 bp, synthetic construct
  misc_feature 1..20: note = HBG1-1 gRNA (OLI13620) targeting domain
  source 1..20: mol_type = other DNA
ccttgtcaaggctattggtc

SEQ ID NO: 1004 - RNA, 24 nt, synthetic construct
  misc_feature 1..24: note = HBG1-1 gRNA (OLI13620) targeting domain plus PAM
  source 1..24: mol_type = other RNA
tttgccttgtcaaggctattggtc

SEQ ID NO: 1005 - DNA, 24 bp, synthetic construct
  misc_feature 1..24: note = HBG1-1 gRNA (OLI13620) targeting domain plus PAM
  source 1..24: mol_type = other DNA
tttgccttgtcaaggctattggtc

SEQ ID NO: 1006 - protein, 16 aa, synthetic construct
  REGION 1..16: note = Nucleoplasmin NLS
KRPAATKKAGQAKKKK

SEQ ID NO: 1007 - protein, 7 aa, synthetic construct
  REGION 1..7: note = Simian Virus 40 NLS
PKKKRKV

SEQ ID NO: 1008 - protein, 1324 aa, synthetic construct
  REGION 1..1324: note = His-AsCpf1-sNLS
  REGION 3..8: note = MISC_FEATURE - His tag
  REGION 1318..1324: note = MISC_FEATURE - SV40 NLS
MKHHHHHHMTQFEGFTNLYQVSKTLRFELIPQGKTLKHIQEQGFIEEDKARNDHYKELKPIIDRIYKTYADQCLQLVQLDWENLSAAIDSYRKEKTEETRNALIEEQATYRNAIHDYFIGRTDNLTDAINKRHAEIYKGLFKAELFNGKVLKQLGTVTTTEHENALLRSFDKFTTYFSGFYENRKNVFSAEDISTAIPHRIVQDNFPKFKENCHIFTRLITAVPSLREHFENVKKAIGIFVSTSIEEVFSFPFYNQLLTQTQIDLYNQLLGGISREAGTEKIKGLNEVLNLAIQKNDETAHIIASLPHRFIPLFKQILSDRNTLSFILEEFKSDEEVIQSFCKYKTLLRNENVLETAEALFNELNSIDLTHIFISHKKLETISSALCDHWDTLRNALYERRISELTGKITKSAKEKVQRSLKHEDINLQEIISAAGKELSEAFKQKTSEILSHAHAALDQPLPTTLKKQEEKEILKSQLDSLLGLYHLLDWFAVDESNEVDPEFSARLTGIKLEMEPSLSFYNKARNYATKKPYSVEKFKLNFQMPTLASGWDVNKEKNNGAILFVKNGLYYLGIMPKQKGRYKALSFEPTEKTSEGFDKMYYDYFPDAAKMIPKCSTQLKAVTAHFQTHTTPILLSNNFIEPLEITKEIYDLNNPEKEPKKFQTAYAKKTGDQKGYREALCKWIDFTRDFLSKYTKTTSIDLSSLRPSSQYKDLGEYYAELNPLLYHISFQRIAEKEIMDAVETGKLYLFQIYNKDFAKGHHGKPNLHTLYWTGLFSPENLAKTSIKLNGQAELFYRPKSRMKRMAHRLGEKMLNKKLKDQKTPIPDTLYQELYDYVNHRLSHDLSDEARALLPNVITKEVSHEIIKDRRFTSDKFFFHVPITLNYQAANSPSKFNQRVNAYLKEHPETPIIGIDRGERNLIYITVIDSTGKILEQRSLNTIQQFDYQKKLDNREKERVAARQAWSVVGTIKDLKQGYLSQVIHEIVDLMIHYQAVVVLENLNFGFKSKRTGIAEKAVYQQFEKMLIDKLNCLVLKDYPAEKVGGVLNPYQLTDQFTSFAKMGTQSGFLFYVPAPYTSKIDPLTGFVDPFVWKTIKNHESRKHFLEGFDFLHYDVKTGDFILHFKMNRNLSFQRGLPGFMPAWDIVFEKNETQFDAKGTPFIAGKRIVPVIENHRFTGRYRDLYPANELIALLEEKGIVFRDGSNILPKLLENDDSHAIDTMVALIRSVLQMRNSNAATGEDYINSPVRDLNGVCFDSRFQNPEWPMDADANGAYHIALKGQLLLNHLKESKDLKLQNGISNQDWLAYIQELRNGSPKKKRKV

SEQ ID NO: 1009 - protein, 1326 aa, synthetic construct
  REGION 1..1326: note = His-sNLS-AsCpf1
  REGION 3..8: note = MISC_FEATURE - His tag
  REGION 11..17: note = MISC_FEATURE - SV40 NLS
MKHHHHHHGSPKKKRKVGSMTQFEGFTNLYQVSKTLRFELIPQGKTLKHIQEQGFIEEDKARNDHYKELKPIIDRIYKTYADQCLQLVQLDWENLSAAIDSYRKEKTEETRNALIEEQATYRNAIHDYFIGRTDNLTDAINKRHAEIYKGLFKAELFNGKVLKQLGTVTTTEHENALLRSFDKFTTYFSGFYENRKNVFSAEDISTAIPHRIVQDNFPKFKENCHIFTRLITAVPSLREHFENVKKAIGIFVSTSIEEVFSFPFYNQLLTQTQIDLYNQLLGGISREAGTEKIKGLNEVLNLAIQKNDETAHIIASLPHRFIPLFKQILSDRNTLSFILEEFKSDEEVIQSFCKYKTLLRNENVLETAEALFNELNSIDLTHIFISHKKLETISSALCDHWDTLRNALYERRISELTGKITKSAKEKVQRSLKHEDINLQEIISAAGKELSEAFKQKTSEILSHAHAALDQPLPTTLKKQEEKEILKSQLDSLLGLYHLLDWFAVDESNEVDPEFSARLTGIKLEMEPSLSFYNKARNYATKKPYSVEKFKLNFQMPTLASGWDVNKEKNNGAILFVKNGLYYLGIMPKQKGRYKALSFEPTEKTSEGFDKMYYDYFPDAAKMIPKCSTQLKAVTAHFQTHTTPILLSNNFIEPLEITKEIYDLNNPEKEPKKFQTAYAKKTGDQKGYREALCKWIDFTRDFLSKYTKTTSIDLSSLRPSSQYKDLGEYYAELNPLLYHISFQRIAEKEIMDAVETGKLYLFQIYNKDFAKGHHGKPNLHTLYWTGLFSPENLAKTSIKLNGQAELFYRPKSRMKRMAHRLGEKMLNKKLKDQKTPIPDTLYQELYDYVNHRLSHDLSDEARALLPNVITKEVSHEIIKDRRFTSDKFFFHVPITLNYQAANSPSKFNQRVNAYLKEHPETPIIGIDRGERNLIYITVIDSTGKILEQRSLNTIQQFDYQKKLDNREKERVAARQAWSVVGTIKDLKQGYLSQVIHEIVDLMIHYQAVVVLENLNFGFKSKRTGIAEKAVYQQFEKMLIDKLNCLVLKDYPAEKVGGVLNPYQLTDQFTSFAKMGTQSGFLFYVPAPYTSKIDPLTGFVDPFVWKTIKNHESRKHFLEGFDFLHYDVKTGDFILHFKMNRNLSFQRGLPGFMPAWDIVFEKNETQFDAKGTPFIAGKRIVPVIENHRFTGRYRDLYPANELIALLEEKGIVFRDGSNILPKLLENDDSHAIDTMVALIRSVLQMRNSNAATGEDYINSPVRDLNGVCFDSRFQNPEWPMDADANGAYHIALKGQLLLNHLKESKDLKLQNGISNQDWLAYIQELRN

SEQ ID NO: 1010 - protein, 1333 aa, synthetic construct
  REGION 1..1333: note = His-sNLS-sNLS-AsCpf1
  REGION 3..8: note = MISC_FEATURE - His tag
  REGION 11..17: note = MISC_FEATURE - SV40 NLS
  REGION 20..26: note = MISC_FEATURE - SV40 NLS
MKHHHHHHGSPKKKRKVGSPKKKRKVMTQFEGFTNLYQVSKTLRFELIPQGKTLKHIQEQGFIEEDKARNDHYKELKPIIDRIYKTYADQCLQLVQLDWENLSAAIDSYRKEKTEETRNALIEEQATYRNAIHDYFIGRTDNLTDAINKRHAEIYKGLFKAELFNGKVLKQLGTVTTTEHENALLRSFDKFTTYFSGFYENRKNVFSAEDISTAIPHRIVQDNFPKFKENCHIFTRLITAVPSLREHFENVKKAIGIFVSTSIEEVFSFPFYNQLLTQTQIDLYNQLLGGISREAGTEKIKGLNEVLNLAIQKNDETAHIIASLPHRFIPLFKQILSDRNTLSFILEEFKSDEEVIQSFCKYKTLLRNENVLETAEALFNELNSIDLTHIFISHKKLETISSALCDHWDTLRNALYERRISELTGKITKSAKEKVQRSLKHEDINLQEIISAAGKELSEAFKQKTSEILSHAHAALDQPLPTTLKKQEEKEILKSQLDSLLGLYHLLDWFAVDESNEVDPEFSARLTGIKLEMEPSLSFYNKARNYATKKPYSVEKFKLNFQMPTLASGWDVNKEKNNGAILFVKNGLYYLGIMPKQKGRYKALSFEPTEKTSEGFDKMYYDYFPDAAKMIPKCSTQLKAVTAHFQTHTTPILLSNNFIEPLEITKEIYDLNNPEKEPKKFQTAYAKKTGDQKGYREALCKWIDFTRDFLSKYTKTTSIDLSSLRPSSQYKDLGEYYAELNPLLYHISFQRIAEKEIMDAVETGKLYLFQIYNKDFAKGHHGKPNLHTLYWTGLFSPENLAKTSIKLNGQAELFYRPKSRMKRMAHRLGEKMLNKKLKDQKTPIPDTLYQELYDYVNHRLSHDLSDEARALLPNVITKEVSHEIIKDRRFTSDKFFFHVPITLNYQAANSPSKFNQRVNAYLKEHPETPIIGIDRGERNLIYITVIDSTGKILEQRSLNTIQQFDYQKKLDNREKERVAARQAWSVVGTIKDLKQGYLSQVIHEIVDLMIHYQAVVVLENLNFGFKSKRTGIAEKAVYQQFEKMLIDKLNCLVLKDYPAEKVGGVLNPYQLTDQFTSFAKMGTQSGFLFYVPAPYTSKIDPLTGFVDPFVWKTIKNHESRKHFLEGFDFLHYDVKTGDFILHFKMNRNLSFQRGLPGFMPAWDIVFEKNETQFDAKGTPFIAGKRIVPVIENHRFTGRYRDLYPANELIALLEEKGIVFRDGSNILPKLLENDDSHAIDTMVALIRSVLQMRNSNAATGEDYINSPVRDLNGVCFDSRFQNPEWPMDADANGAYHIALKGQLLLNHLKESKDLKLQNGISNQDWLAYIQELRN

SEQ ID NO: 1011 - protein, 1327 aa, synthetic construct
  REGION 1..1327: note = sNLS-sNLS-AsCpf1
  REGION 5..11: note = MISC_FEATURE - SV40 NLS
  REGION 14..20: note = MISC_FEATURE - SV40 NLS
MKGSPKKKRKVGSPKKKRKVMTQFEGFTNLYQVSKTLRFELIPQGKTLKHIQEQGFIEEDKARNDHYKELKPIIDRIYKTYADQCLQLVQLDWENLSAAIDSYRKEKTEETRNALIEEQATYRNAIHDYFIGRTDNLTDAINKRHAEIYKGLFKAELFNGKVLKQLGTVTTTEHENALLRSFDKFTTYFSGFYENRKNVFSAEDISTAIPHRIVQDNFPKFKENCHIFTRLITAVPSLREHFENVKKAIGIFVSTSIEEVFSFPFYNQLLTQTQIDLYNQLLGGISREAGTEKIKGLNEVLNLAIQKNDETAHIIASLPHRFIPLFKQILSDRNTLSFILEEFKSDEEVIQSFCKYKTLLRNENVLETAEALFNELNSIDLTHIFISHKKLETISSALCDHWDTLRNALYERRISELTGKITKSAKEKVQRSLKHEDINLQEIISAAGKELSEAFKQKTSEILSHAHAALDQPLPTTLKKQEEKEILKSQLDSLLGLYHLLDWFAVDESNEVDPEFSARLTGIKLEMEPSLSFYNKARNYATKKPYSVEKFKLNFQMPTLASGWDVNKEKNNGAILFVKNGLYYLGIMPKQKGRYKALSFEPTEKTSEGFDKMYYDYFPDAAKMIPKCSTQLKAVTAHFQTHTTPILLSNNFIEPLEITKEIYDLNNPEKEPKKFQTAYAKKTGDQKGYREALCKWIDFTRDFLSKYTKTTSIDLSSLRPSSQYKDLGEYYAELNPLLYHISFQRIAEKEIMDAVETGKLYLFQIYNKDFAKGHHGKPNLHTLYWTGLFSPENLAKTSIKLNGQAELFYRPKSRMKRMAHRLGEKMLNKKLKDQKTPIPDTLYQELYDYVNHRLSHDLSDEARALLPNVITKEVSHEIIKDRRFTSDKFFFHVPITLNYQAANSPSKFNQRVNAYLKEHPETPIIGIDRGERNLIYITVIDSTGKILEQRSLNTIQQFDYQKKLDNREKERVAARQAWSVVGTIKDLKQGYLSQVIHEIVDLMIHYQAVVVLENLNFGFKSKRTGIAEKAVYQQFEKMLIDKLNCLVLKDYPAEKVGGVLNPYQLTDQFTSFAKMGTQSGFLFYVPAPYTSKIDPLTGFVDPFVWKTIKNHESRKHFLEGFDFLHYDVKTGDFILHFKMNRNLSFQRGLPGFMPAWDIVFEKNETQFDAKGTPFIAGKRIVPVIENHRFTGRYRDLYPANELIALLEEKGIVFRDGSNILPKLLENDDSHAIDTMVALIRSVLQMRNSNAATGEDYINSPVRDLNGVCFDSRFQNPEWPMDADANGAYHIALKGQLLLNHLKESKDLKLQNGISNQDWLAYIQELRN

SEQ ID NO: 1012 - protein, 1332 aa, synthetic construct
  REGION 1..1332: note = His-sNLS-AsCpf1-sNLS
  REGION 3..8: note = MISC_FEATURE - His tag
  REGION 10..16: note = MISC_FEATURE - SV40 NLS
  REGION 1325..1331: note = MISC_FEATURE - SV40 NLS
MKHHHHHHMPKKKRKVMTQFEGFTNLYQVSKTLRFELIPQGKTLKHIQEQGFIEEDKARNDHYKELKPIIDRIYKTYADQCLQLVQLDWENLSAAIDSYRKEKTEETRNALIEEQATYRNAIHDYFIGRTDNLTDAINKRHAEIYKGLFKAELFNGKVLKQLGTVTTTEHENALLRSFDKFTTYFSGFYENRKNVFSAEDISTAIPHRIVQDNFPKFKENCHIFTRLITAVPSLREHFENVKKAIGIFVSTSIEEVFSFPFYNQLLTQTQIDLYNQLLGGISREAGTEKIKGLNEVLNLAIQKNDETAHIIASLPHRFIPLFKQILSDRNTLSFILEEFKSDEEVIQSFCKYKTLLRNENVLETAEALFNELNSIDLTHIFISHKKLETISSALCDHWDTLRNALYERRISELTGKITKSAKEKVQRSLKHEDINLQEIISAAGKELSEAFKQKTSEILSHAHAALDQPLPTTLKKQEEKEILKSQLDSLLGLYHLLDWFAVDESNEVDPEFSARLTGIKLEMEPSLSFYNKARNYATKKPYSVEKFKLNFQMPTLASGWDVNKEKNNGAILFVKNGLYYLGIMPKQKGRYKALSFEPTEKTSEGFDKMYYDYFPDAAKMIPKCSTQLKAVTAHFQTHTTPILLSNNFIEPLEITKEIYDLNNPEKEPKKFQTAYAKKTGDQKGYREALCKWIDFTRDFLSKYTKTTSIDLSSLRPSSQYKDLGEYYAELNPLLYHISFQRIAEKEIMDAVETGKLYLFQIYNKDFAKGHHGKPNLHTLYWTGLFSPENLAKTSIKLNGQAELFYRPKSRMKRMAHRLGEKMLNKKLKDQKTPIPDTLYQELYDYVNHRLSHDLSDEARALLPNVITKEVSHEIIKDRRFTSDKFFFHVPITLNYQAANSPSKFNQRVNAYLKEHPETPIIGIDRGERNLIYITVIDSTGKILEQRSLNTIQQFDYQKKLDNREKERVAARQAWSVVGTIKDLKQGYLSQVIHEIVDLMIHYQAVVVLENLNFGFKSKRTGIAEKAVYQQFEKMLIDKLNCLVLKDYPAEKVGGVLNPYQLTDQFTSFAKMGTQSGFLFYVPAPYTSKIDPLTGFVDPFVWKTIKNHESRKHFLEGFDFLHYDVKTGDFILHFKMNRNLSFQRGLPGFMPAWDIVFEKNETQFDAKGTPFIAGKRIVPVIENHRFTGRYRDLYPANELIALLEEKGIVFRDGSNILPKLLENDDSHAIDTMVALIRSVLQMRNSNAATGEDYINSPVRDLNGVCFDSRFQNPEWPMDADANGAYHIALKGQLLLNHLKESKDLKLQNGISNQDWLAYIQELRNGPKKKRKVG

SEQ ID NO: 1013 - protein, 1352 aa, synthetic construct
  REGION 1..1352: note = His-sNLS-sNLS-AsCpf1-sNLS-sNLS
  REGION 3..8: note = MISC_FEATURE - His tag
  REGION 11..17: note = MISC_FEATURE - SV40 NLS
  REGION 20..26: note = MISC_FEATURE - SV40 NLS
  REGION 1337..1343: note = MISC_FEATURE - SV40 NLS
  REGION 1346..1352: note = MISC_FEATURE - SV40 NLS
MGHHHHHHGSPKKKRKVGSPKKKRKVGSTQFEGFTNLYQVSKTLRFELIPQGKTLKHIQEQGFIEEDKARNDHYKELKPIIDRIYKTYADQCLQLVQLDWENLSAAIDSYRKEKTEETRNALIEEQATYRNAIHDYFIGRTDNLTDAINKRHAEIYKGLFKAELFNGKVLKQLGTVTTTEHENALLRSFDKFTTYFSGFYENRKNVFSAEDISTAIPHRIVQDNFPKFKENCHIFTRLITAVPSLREHFENVKKAIGIFVSTSIEEVFSFPFYNQLLTQTQIDLYNQLLGGISREAGTEKIKGLNEVLNLAIQKNDETAHIIASLPHRFIPLFKQILSDRNTLSFILEEFKSDEEVIQSFCKYKTLLRNENVLETAEALFNELNSIDLTHIFISHKKLETISSALCDHWDTLRNALYERRISELTGKITKSAKEKVQRSLKHEDINLQEIISAAGKELSEAFKQKTSEILSHAHAALDQPLPTTLKKQEEKEILKSQLDSLLGLYHLLDWFAVDESNEVDPEFSARLTGIKLEMEPSLSFYNKARNYATKKPYSVEKFKLNFQMPTLASGWDVNKEKNNGAILFVKNGLYYLGIMPKQKGRYKALSFEPTEKTSEGFDKMYYDYFPDAAKMIPKCSTQLKAVTAHFQTHTTPILLSNNFIEPLEITKEIYDLNNPEKEPKKFQTAYAKKTGDQKGYREALCKWIDFTRDFLSKYTKTTSIDLSSLRPSSQYKDLGEYYAELNPLLYHISFQRIAEKEIMDAVETGKLYLFQIYNKDFAKGHHGKPNLHTLYWTGLFSPENLAKTSIKLNGQAELFYRPKSRMKRMAARLGEKMLNKKLKDQKTPIPDTLYQELYDYVNHRLSHDLSDEARALLPNVITKEVSHEIIKDRRFTSDKFFFHVPITLNYQAANSPSKFNQRVNAYLKEHPETPIIGIDRGERNLIYITVIDSTGKILEQRSLNTIQQFDYQKKLDNREKERVAARQAWSVVGTIKDLKQGYLSQVIHEIVDLMIHYQAVVVLENLNFGFKSKRTGIAEKAVYQQFEKMLIDKLNCLVLKDYPAEKVGGVLNPYQLTDQFTSFAKMGTQSGFLFYVPAPYTSKIDPLTGFVDPFVWKTIKNHESRKHFLEGFDFLHYDVKTGDFILHFKMNRNLSFQRGLPGFMPAWDIVFEKNETQFDAKGTPFIAGKRIVPVIENHRFTGRYRDLYPANELIALLEEKGIVFRDGSNILPKLLENDDSHAIDTMVALIRSVLQMRNSNAATGEDYINSPVRDLNGVCFDSRFQNPEWPMDADANGAYHIALKGQLLLNHLKESKDLKLQNGISNQDWLAYIQELRNGSPKKKRKVGSPKKKRKV

SEQ ID NO: 1014 - protein, 1332 aa, synthetic construct
  REGION 1..1332: note = His-AsCpf1-nNLS Cys-less
  REGION 3..8: note = MISC_FEATURE - His tag
  REGION 1316..1331: note = MISC_FEATURE - Nucleoplasmin NLS
MKHHHHHHMTQFEGFTNLYQVSKTLRFELIPQGKTLKHIQEQGFIEEDKARNDHYKELKPIIDRIYKTYADQSLQLVQLDWENLSAAIDSYRKEKTEETRNALIEEQATYRNAIHDYFIGRTDNLTDAINKRHAEIYKGLFKAELFNGKVLKQLGTVTTTEHENALLRSFDKFTTYFSGFYENRKNVFSAEDISTAIPHRIVQDNFPKFKENSHIFTRLITAVPSLREHFENVKKAIGIFVSTSIEEVFSFPFYNQLLTQTQIDLYNQLLGGISREAGTEKIKGLNEVLNLAIQKNDETAHIIASLPHRFIPLFKQILSDRNTLSFILEEFKSDEEVIQSFSKYKTLLRNENVLETAEALFNELNSIDLTHIFISHKKLETISSALSDHWDTLRNALYERRISELTGKITKSAKEKVQRSLKHEDINLQEIISAAGKELSEAFKQKTSEILSHAHAALDQPLPTTLKKQEEKEILKSQLDSLLGLYHLLDWFAVDESNEVDPEFSARLTGIKLEMEPSLSFYNKARNYATKKPYSVEKFKLNFQMPTLASGWDVNKEKNNGAILFVKNGLYYLGIMPKQKGRYKALSFEPTEKTSEGFDKMYYDYFPDAAKMIPKSSTQLKAVTAHFQTHTTPILLSNNFIEPLEITKEIYDLNNPEKEPKKFQTAYAKKTGDQKGYREALSKWIDFTRDFLSKYTKTTSIDLSSLRPSSQYKDLGEYYAELNPLLYHISFQRIAEKEIMDAVETGKLYLFQIYNKDFAKGHHGKPNLHTLYWTGLFSPENLAKTSIKLNGQAELFYRPKSRMKRMAHRLGEKMLNKKLKDQKTPIPDTLYQELYDYVNHRLSHDLSDEARALLPNVITKEVSHEIIKDRRFTSDKFFFHVPITLNYQAANSPSKFNQRVNAYLKEHPETPIIGIDRGERNLIYITVIDSTGKILEQRSLNTIQQFDYQKKLDNREKERVAARQAWSVVGTIKDLKQGYLSQVIHEIVDLMIHYQAVVVLENLNFGFKSKRTGIAEKAVYQQFEKMLIDKLNSLVLKDYPAEKVGGVLNPYQLTDQFTSFAKMGTQSGFLFYVPAPYTSKIDPLTGFVDPFVWKTIKNHESRKHFLEGFDFLHYDVKTGDFILHFKMNRNLSFQRGLPGFMPAWDIVFEKNETQFDAKGTPFIAGKRIVPVIENHRFTGRYRDLYPANELIALLEEKGIVFRDGSNILPKLLENDDSHAIDTMVALIRSVLQMRNSNAATGEDYINSPVRDLNGVSFDSRFQNPEWPMDADANGAYHIALKGQLLLNHLKESKDLKLQNGISNQDWLAYIQELRNKRPAATKKAGQAKKKKG

SEQ ID NO: 1015 - protein, 1332 aa, synthetic construct
  REGION 1..1332: note = His-AsCpf1-nNLS Cys-low
  REGION 3..8: note = MISC_FEATURE - His tag
  REGION 1316..1331: note = MISC_FEATURE - Nucleoplasmin NLS
MKHHHHHHMTQFEGFTNLYQVSKTLRFELIPQGKTLKHIQEQGFIEEDKARNDHYKELKPIIDRIYKTYADQCLQLVQLDWENLSAAIDSYRKEKTEETRNALIEEQATYRNAIHDYFIGRTDNLTDAINKRHAEIYKGLFKAELFNGKVLKQLGTVTTTEHENALLRSFDKFTTYFSGFYENRKNVFSAEDISTAIPHRIVQDNFPKFKENCHIFTRLITAVPSLREHFENVKKAIGIFVSTSIEEVFSFPFYNQLLTQTQIDLYNQLLGGISREAGTEKIKGLNEVLNLAIQKNDETAHIIASLPHRFIPLFKQILSDRNTLSFILEEFKSDEEVIQSFSKYKTLLRNENVLETAEALFNELNSIDLTHIFISHKKLETISSALSDHWDTLRNALYERRISELTGKITKSAKEKVQRSLKHEDINLQEIISAAGKELSEAFKQKTSEILSHAHAALDQPLPTTLKKQEEKEILKSQLDSLLGLYHLLDWFAVDESNEVDPEFSARLTGIKLEMEPSLSFYNKARNYATKKPYSVEKFKLNFQMPTLASGWDVNKEKNNGAILFVKNGLYYLGIMPKQKGRYKALSFEPTEKTSEGFDKMYYDYFPDAAKMIPKCSTQLKAVTAHFQTHTTPILLSNNFIEPLEITKEIYDLNNPEKEPKKFQTAYAKKTGDQKGYREALSKWIDFTRDFLSKYTKTTSIDLSSLRPSSQYKDLGEYYAELNPLLYHISFQRIAEKEIMDAVETGKLYLFQIYNKDFAKGHHGKPNLHTLYWTGLFSPENLAKTSIKLNGQAELFYRPKSRMKRMAHRLGEKMLNKKLKDQKTPIPDTLYQELYDYVNHRLSHDLSDEARALLPNVITKEVSHEIIKDRRFTSDKFFFHVPITLNYQAANSPSKFNQRVNAYLKEHPETPIIGIDRGERNLIYITVIDSTGKILEQRSLNTIQQFDYQKKLDNREKERVAARQAWSVVGTIKDLKQGYLSQVIHEIVDLMIHYQAVVVLENLNFGFKSKRTGIAEKAVYQQFEKMLIDKLNCLVLKDYPAEKVGGVLNPYQLTDQFTSFAKMGTQSGFLFYVPAPYTSKIDPLTGFVDPFVWKTIKNHESRKHFLEGFDFLHYDVKTGDFILHFKMNRNLSFQRGLPGFMPAWDIVFEKNETQFDAKGTPFIAGKRIVPVIENHRFTGRYRDLYPANELIALLEEKGIVFRDGSNILPKLLENDDSHAIDTMVALIRSVLQMRNSNAATGEDYINSPVRDLNGVCFDSRFQNPEWPMDADANGAYHIALKGQLLLNHLKESKDLKLQNGISNQDWLAYIQELRNKRPAATKKAGQAKKKKG

SEQ ID NO: 1016 - protein, 1307 aa, Streptococcus mutans
MTQFEGFTNLYQVSKTLRFELIPQGKTLKHIQEQGFIEEDKARNDHYKELKPIIDRIYKTYADQCLQLVQLDWENLSAAIDSYRKEKTEETRNALIEEQATYRNAIHDYFIGRTDNLTDAINKRHAEIYKGLFKAELFNGKVLKQLGTVTTTEHENALLRSFDKFTTYFSGFYENRKNVFSAEDISTAIPHRIVQDNFPKFKENCHIFTRLITAVPSLREHFENVKKAIGIFVSTSIEEVFSFPFYNQLLTQTQIDLYNQLLGGISREAGTEKIKGLNEVLNLAIQKNDETAHIIASLPHRFIPLFKQILSDRNTLSFILEEFKSDEEVIQSFCKYKTLLRNENVLETAEALFNELNSIDLTHIFISHKKLETISSALCDHWDTLRNALYERRISELTGKITKSAKEKVQRSLKHEDINLQEIISAAGKELSEAFKQKTSEILSHAHAALDQPLPTTLKKQEEKEILKSQLDSLLGLYHLLDWFAVDESNEVDPEFSARLTGIKLEMEPSLSFYNKARNYATKKPYSVEKFKLNFQMPTLASGWDVNKEKNNGAILFVKNGLYYLGIMPKQKGRYKALSFEPTEKTSEGFDKMYYDYFPDAAKMIPKCSTQLKAVTAHFQTHTTPILLSNNFIEPLEITKEIYDLNNPEKEPKKFQTAYAKKTGDQKGYREALCKWIDFTRDFLSKYTKTTSIDLSSLRPSSQYKDLGEYYAELNPLLYHISFQRIAEKEIMDAVETGKLYLFQIYNKDFAKGHHGKPNLHTLYWTGLFSPENLAKTSIKLNGQAELFYRPKSRMKRMAHRLGEKMLNKKLKDQKTPIPDTLYQELYDYVNHRLSHDLSDEARALLPNVITKEVSHEIIKDRRFTSDKFFFHVPITLNYQAANSPSKFNQRVNAYLKEHPETPIIGIDRGERNLIYITVIDSTGKILEQRSLNTIQQFDYQKKLDNREKERVAARQAWSVVGTIKDLKQGYLSQVIHEIVDLMIHYQAVVVLENLNFGFKSKRTGIAEKAVYQQFEKMLIDKLNCLVLKDYPAEKVGGVLNPYQLTDQFTSFAKMGTQSGFLFYVPAPYTSKIDPLTGFVDPFVWKTIKNHESRKHFLEGFDFLHYDVKTGDFILHFKMNRNLSFQRGLPGFMPAWDIVFEKNETQFDAKGTPFIAGKRIVPVIENHRFTGRYRDLYPANELIALLEEKGIVFRDGSNILPKLLENDDSHAIDTMVALIRSVLQMRNSNAATGEDYINSPVRDLNGVCFDSRFQNPEWPMDADANGAYHIALKGQLLLNHLKESKDLKLQNGISNQDWLAYIQELRN

SEQ ID NO: 1017 - protein, 1228 aa, Streptococcus mutans
MSKLEKFTNCYSLSKTLRFKAIPVGKTQENIDNKRLLVEDEKRAEDYKGVKKLLDRYYLSFINDVLHSIKLKNLNNYISLFRKKTRTEKENKELENLEINLRKEIAKAFKGNEGYKSLFKKDIIETILPEFLDDKDEIALVNSFNGFTTAFTGFFDNRENMFSEEAKSTSIAFRCINENLTRYISNMDIFEKVDAIFDKHEVQEIKEKILNSDYDVEDFFEGEFFNFVLTQEGIDVYNAIIGGFVTESGEKIKGLNEYINLYNQKTKQKLPKFKPLYKQVLSDRESLSFYGEGYTSDEEVLEVFRNTLNKNSEIFSSIKKLEKLFKNFDEYSSAGIFVKNGPAISTISKDIFGEWNVIRDKWNAEYDDIHLKKKAVVTEKYEDDRRKSFKKIGSFSLEQLQEYADADLSVVEKLKEIIIQKVDEIYKVYGSSEKLFDADFVLEKSLKKNDAVVAIMKDLLDSVKSFENYIKAFFGEGKETNRDESFYGDFVLAYDILLKVDHIYDAIRNYVTQKPYSKDKFKLYFQNPQFMGGWDKDKETDYRATILRYGSKYYLAIMDKKYAKCLQKIDKDDVNGNYEKINYKLLPGPNKMLPKVFFSKKWMAYYNPSEDIQKIYKNGTFKKGDMFNLNDCHKLIDFFKDSISRYPKWSNAYDFNFSETEKYKDIAGFYREVEEQGYKVSFESASKKEVDKLVEEGKLYMFQIYNKDFSDKSHGTPNLHTMYFKLLFDENNHGQIRLSGGAELFMRRASLKKEELVVHPANSPIANKNPDNPKKTTTLSYDVYKDKRFSEDQYELHIPIAINKCPKNIFKINTEVRVLLKHDDNPYVIGIDRGERNLLYIVVVDGKGNIVEQYSLNEIINNFNGIRIKTDYHSLLDKKEKERFEARQNWTSIENIKELKAGYISQVVHKICELVEKYDAVIALEDLNSGFKNSRVKVEKQVYQKFEKMLIDKLNYMVDKKSNPCATGGALKGYQITNKFESFKSMSTQNGFIFYIPAWLTSKIDPSTGFVNLLKTKYTSIADSKKFISSFDRIMYVPEEDLFEFALDYKNFSRTDADYIKKWKLYSYGNRIRIFRNPKKNNVFDWEEVCLTSAYKELFNKYGINYQQGDIRALLCEQSDKAFYSSFMALMSLMLQMRNSITGRTDVDFLISPVKNSDGIFYDSRNYEAQENAILPKNADANGAYNIARKVLWAIGQFKKAEDEKLDKVKIAISNKEWLEYAQTSVKH

SEQ ID NO: 1018 - protein, 1206 aa, Streptococcus mutans
MYYESLTKQYPVSKTIRNELIPIGKTLDNIRQNNILESDVKRKQNYEHVKGILDEYHKQLINEALDNCTLPSLKIAAEIYLKNQKEVSDREDFNKTQDLLRKEVVEKLKAHENFTKIGKKDILDLLEKLPSISEDDYNALESFRNFYTYFTSYNKVRENLYSDKEKSSTVAYRLINENFPKFLDNVKSYRFVKTAGILADGLGEEEQDSLFIVETFNKTLTQDGIDTYNSQVGKINSSINLYNQKNQKANGFRKIPKMKMLYKQILSDREESFIDEFQSDEVLIDNVESYGSVLIESLKSSKVSAFFDALRESKGKNVYVKNDLAKTAMSNIVFENWRTFDDLLNQEYDLANENKKKDDKYFEKRQKELKKNKSYSLEHLCNLSEDSCNLIENYIHQISDDIENIIINNETFLRIVINEHDRSRKLAKNRKAVKAIKDFLDSIKVLERELKLINSSGQELEKDLIVYSAHEELLVELKQVDSLYNMTRNYLTKKPFSTEKVKLNFNRSTLLNGWDRNKETDNLGVLLLKDGKYYLGIMNTSANKAFVNPPVAKTEKVFKKVDYKLLPVPNQMLPKVFFAKSNIDFYNPSSEIYSNYKKGTHKKGNMFSLEDCHNLIDFFKESISKHEDWSKFGFKFSDTASYNDISEFYREVEKQGYKLTYTDIDETYINDLIERNELYLFQIYNKDFSMYSKGKLNLHTLYFMMLFDQRNIDDVVYKLNGEAEVFYRPASISEDELIIHKAGEEIKNKNPNRARTKETSTFSYDIVKDKRYSKDKFTLHIPITMNFGVDEVKRFNDAVNSAIRIDENVNVIGIDRGERNLLYVVVIDSKGNILEQISLNSIINKEYDIETDYHALLDEREGGRDKARKDWNTVENIRDLKAGYLSQVVNVVAKLVLKYNAIICLEDLNFGFKRGRQKVEKQVYQKFEKMLIDKLNYLVIDKSREQTSPKELGGALNALQLTSKFKSFKELGKQSGVIYYVPAYLTSKIDPTTGFANLFYMKCENVEKSKRFFDGFDFIRFNALENVFEFGFDYRSFTQRACGINSKWTVCTNGERIIKYRNPDKNNMFDEKVVVVTDEMKNLFEQYKIPYEDGRNVKDMIISNEEAEFYRRLYRLLQQTLQMRNSTSDGTRDYIISPVKNKREAYFNSELSDGSVPKDADANGAYNIARKGLWVLEQIRQKSEGEKINLAMTNAEWLEYAQTHLL

SEQ ID NO: 1019 - DNA, 4059 bp, Streptococcus mutans
  source 1..4059: mol_type = other DNA
atgacccagttcgagggcttcaccaacctgtaccaggtgagcaagaccctgcggttcgagctgatcccccagggcaagaccctgaagcacatccaggagcagggcttcatcgaggaggacaaggcccggaacgaccactacaaggagctgaagcccatcatcgaccggatctacaagacctacgccgaccagtgcctgcagctggtgcagctggactgggagaacctgagcgccgccatcgacagctaccggaaggagaagaccgaggagacccggaacgccctgatcgaggagcaggccacctaccggaacgccatccacgactacttcatcggccggaccgacaacctgaccgacgccatcaacaagcggcacgccgagatctacaagggcctgttcaaggccgagctgttcaacggcaaggtgctgaagcagctgggcaccgtgaccaccaccgagcacgagaacgccctgctgcggagcttcgacaagttcaccacctacttcagcggcttctacgagaaccggaagaacgtgttcagcgccgaggacatcagcaccgccatcccccaccggatcgtgcaggacaacttccccaagttcaaggagaactgccacatcttcacccggctgatcaccgccgtgcccagcctgcgggagcacttcgagaacgtgaagaaggccatcggcatcttcgtgagcaccagcatcgaggaggtgttcagcttccccttctacaaccagctgctgacccagacccagatcgacctgtacaaccagctgctgggcggcatcagccgggaggccggcaccgagaagatcaagggcctgaacgaggtgctgaacctggccatccagaagaacgacgagaccgcccacatcatcgccagcctgccccaccggttcatccccctgttcaagcagatcctgagcgaccggaacaccctgagcttcatcctggaggagttcaagagcgacgaggaggtgatccagagcttctgcaagtacaagaccctgctgcggaacgagaacgtgctggagaccgccgaggccctgttcaacgagctgaacagcatcgacctgacccacatcttcatcagccacaagaagctggagaccatcagcagcgccctgtgcgaccactgggacaccctgcggaacgccctgtacgagcggcggatcagcgagctgaccggcaagatcaccaagagcgccaaggagaaggtgcagcggagcctgaagcacgaggacatcaacctgcaggagatcatcagcgccgccggcaaggagctgagcgaggccttcaagcagaagaccagcgagatcctgagccacgcccacgccgccctggaccagcccctgcccaccaccctgaagaagcaggaggagaaggagatcctgaaaagccagctggacagcctgctgggcctgtaccacctgctggactggttcgccgtggacgagagcaacgaggtggaccccgagttcagcgcccggctgaccggcatcaagctggagatggagcccagcctgagcttctacaacaaggcccggaactacgccaccaagaagccctacagcgtggagaagttcaagctgaacttccagatgcccaccctggccagcggctgggacgtgaacaaggagaagaacaacggcgccatcctgttcgtgaagaacggcctgtactacctgggcatcatgcccaagcagaagggccggtacaaggccctgagcttcgagcccaccgagaagaccagcgagggcttcgacaagatgtactacgactacttccccgacgccgccaagatgatccccaagtgcagcacccagctgaaggccgtgaccgcccacttccagacccacaccacccccatcctgctgagcaacaacttcatcgagcccctggagatcaccaaggagatctacgacctgaacaaccccgagaaggagcccaagaagttccagaccgcctacgccaagaagaccggcgaccagaagggctaccgggaggccctgtgcaagtggatcgacttcacccgggacttcctgagcaagtacaccaagaccaccagcatcgacctgagcagcctgcggcccagcagccagtacaaggacctgggcgagtactacgccgagctgaaccccctgctgtaccacatcagcttccagcggatcgccgagaaggagatcatggacgccgtggagaccggcaagctgtacctgttccagatctacaacaaggacttcgccaagggccaccacggcaagcccaacctgcacaccctgtactggaccggcctgttcagccccgagaacctggccaagaccagcatcaagctgaacggccaggccgagctgttctaccggcccaagagccggatgaagcggatggcccaccggctgggcgagaagatgctgaacaagaagctgaaggaccagaagacccccatccccgacaccctgtaccaggagctgtacgactacgtgaaccaccggctgagccacgacctgagcgacgaggcccgggccctgctgcccaacgtgatcaccaaggaggtgagccacgagatcatcaaggaccggcggttcaccagcgacaagttcttcttccacgtgcccatcaccctgaactaccaggccgccaacagccccagcaagttcaaccagcgggtgaacgcctacctgaaggagcaccccgagacccccatcatcggcatcgaccggggcgagcggaacctgatctacatcaccgtgatcgacagcaccggcaagatcctggagcagcggagcctgaacaccatccagcagttcgactaccagaagaagctggacaaccgggagaaggagcgggtggccgcccggcaggcctggagcgtggtgggcaccatcaaggacctgaagcagggctacctgagccaggtgatccacgagatcgtggacctgatgatccactaccaggccgtggtggtgctggagaacctgaacttcggcttcaagagcaagcggaccggcatcgccgagaaggccgtgtaccagcagttcgagaagatgctgatcgacaagctgaactgcctggtgctgaaggactaccccgccgagaaggtgggcggcgtgctgaacccctaccagctgaccgaccagttcaccagcttcgccaagatgggcacccagagcggcttcctgttctacgtgcccgccccctacaccagcaagatcgaccccctgaccggcttcgtggaccccttcgtgtggaagaccatcaagaaccacgagagccggaagcacttcctggagggcttcgacttcctgcactacgacgtgaagaccggcgacttcatcctgcacttcaagatgaaccggaacctgagcttccagcggggcctgcccggcttcatgcccgcctgggacatcgtgttcgagaagaacgagacccagttcgacgccaagggcacccccttcatcgccggcaagcggatcgtgcccgtgatcgagaaccaccggttcaccggccggtaccgggacctgtaccccgccaacgagctgatcgccctgctggaggagaagggcatcgtgttccgggacggcagcaacatcctgcccaagctgctggagaacgacgacagccacgccatcgacaccatggtggccctgatccggagcgtgctgcagatgcggaacagcaacgccgccaccggcgaggactacatcaacagccccgtgcgggacctgaacggcgtgtgcttcgacagccggttccagaaccccgagtggcccatggacgccgacgccaacggcgcctaccacatcgccctgaagggccagctgctgctgaaccacctgaaggagagcaaggacctgaagctgcagaacggcatcagcaaccaggactggctggcctacatccaggagctgcggaacaagcggcccgccgccaccaagaaggccggccaggccaagaagaagaagggcagctacccctacgacgtgcccgactacgcctacccctacgacgtgcccgactacgcctacccctacgacgtgcccgactacgcctga

SEQ ID NO: 1020 - DNA, 3822 bp, Streptococcus mutans
  source 1..3822: mol_type = other DNA
atgagcaagctggagaagttcaccaactgctacagcctgagcaagaccctgcggttcaaggccatccccgtgggcaagacccaggagaacatcgacaacaagcggctgctggtggaggacgagaagcgggccgaggactacaagggcgtgaagaagctgctggaccggtactacctgagcttcatcaacgacgtgctgcacagcatcaagctgaagaacctgaacaactacatcagcctgttccggaagaagacccggaccgagaaggagaacaaggagctggagaacctggagatcaacctgcggaaggagatcgccaaggccttcaagggcaacgagggctacaagagcctgttcaagaaggacatcatcgagaccatcctgcccgagttcctggacgacaaggacgagatcgccctggtgaacagcttcaacggcttcaccaccgccttcaccggcttcttcgacaaccgggagaacatgttcagcgaggaggccaagagcaccagcatcgccttccggtgcatcaacgagaacctgacccggtacatcagcaacatggacatcttcgagaaggtggacgccatcttcgacaagcacgaggtgcaggagatcaaggagaagatcctgaacagcgactacgacgtggaggacttcttcgagggcgagttcttcaacttcgtgctgacccaggagggcatcgacgtgtacaacgccatcatcggcggcttcgtgaccgagagcggcgagaagatcaagggcctgaacgagtacatcaacctgtacaaccagaagaccaagcagaagctgcccaagttcaagcccctgtacaagcaggtgctgagcgaccgggagagcctgagcttctacggcgagggctacaccagcgacgaggaggtgctggaggtgttccggaacaccctgaacaagaacagcgagatcttcagcagcatcaagaagctggagaagctgttcaagaacttcgacgagtacagcagcgccggcatcttcgtgaagaacggccccgccatcagcaccatcagcaaggacatcttcggcgagtggaacgtgatccgggacaagtggaacgccgagtacgacgacatccacctgaagaagaaggccgtggtgaccgagaagtacgaggacgaccggcggaaaagcttcaagaagatcggcagcttcagcctggagcagctgcaggagtacgccgacgccgacctgagcgtggtggagaagctgaaggagatcatcatccagaaggtggacgagatctacaaggtgtacggcagcagcgagaagctgttcgacgccgacttcgtgctggagaaaagcctgaagaagaacgacgccgtggtggccatcatgaaggacctgctggacagcgtgaaaagcttcgagaactacatcaaggccttcttcggcgagggcaaggagaccaaccgggacgagagcttctacggcgacttcgtgctggcctacgacatcctgctgaaggtggaccacatctacgacgccatccggaactacgtgacccagaagccctacagcaaggacaagttcaagctgtacttccagaacccccagttcatgggcggctgggacaaggacaaggagaccgactaccgggccaccatcctgcggtacggcagcaagtactacctggccatcatggacaagaagtacgccaagtgcctgcagaagatcgacaaggacgacgtgaacggcaactacgagaagatcaactacaagctgctgcccggccccaacaagatgctgcccaaggtgttcttcagcaagaagtggatggcctactacaaccccagcgaggacatccagaagatctacaagaacggcaccttcaagaagggcgacatgttcaacctgaacgactgccacaagctgatcgacttcttcaaggacagcatcagccggtaccccaagtggagcaacgcctacgacttcaacttcagcgagaccgagaagtacaaggacatcgccggcttctaccgggaggtggaggagcagggctacaaggtgagcttcgagagcgccagcaagaaggaggtggacaagctggtggaggagggcaagctgtacatgttccagatctacaacaaggacttcagcgacaagagccacggcacccccaacctgcacaccatgtacttcaagctgctgttcgacgagaacaaccacggccagatccggctgagcggcggcgccgagctgttcatgcggcgggccagcctgaagaaggaggagctggtggtgcaccccgccaacagccccatcgccaacaagaaccccgacaaccccaagaagaccaccaccctgagctacgacgtgtacaaggacaagcggttcagcgaggaccagtacgagctgcacatccccatcgccatcaacaagtgccccaagaacatcttcaagatcaacaccgaggtgcgggtgctgctgaagcacgacgacaacccctacgtgatcggcatcgaccggggcgagcggaacctgctgtacatcgtggtggtggacggcaagggcaacatcgtggagcagtacagcctgaacgagatcatcaacaacttcaacggcatccggatcaagaccgactaccacagcctgctggacaagaaggagaaggagcggttcgaggcccggcagaactggaccagcatcgagaacatcaaggagctgaaggccggctacatcagccaggtggtgcacaagatctgcgagctggtggagaagtacgacgccgtgatcgccctggaggacctgaacagcggcttcaagaacagccgggtgaaggtggagaagcaggtgtaccagaagttcgagaagatgctgatcgacaagctgaactacatggtggacaagaaaagcaacccctgcgccaccggcggcgccctgaagggctaccagatcaccaacaagttcgagagcttcaagagcatgagcacccagaacggcttcatcttctacatccccgcctggctgaccagcaagatcgaccccagcaccggcttcgtgaacctgctgaagaccaagtacaccagcatcgccgacagcaagaagttcatcagcagcttcgaccggatcatgtacgtgcccgaggaggacctgttcgagttcgccctggactacaagaacttcagccggaccgacgccgactacatcaagaagtggaagctgtacagctacggcaaccggatccggatcttccggaaccccaagaagaacaacgtgttcgactgggaggaggtgtgcctgaccagcgcctacaaggagctgttcaacaagtacggcatcaactaccagcagggcgacatccgggccctgctgtgcgagcagagcgacaaggccttctacagcagcttcatggccctgatgagcctgatgctgcagatgcggaacagcatcaccggccggaccgacgtggacttcctgatcagccccgtgaagaacagcgacggcatcttctacgacagccggaactacgaggcccaggagaacgccatcctgcccaagaacgccgacgccaacggcgcctacaacatcgcccggaaggtgctgtgggccatcggccagttcaagaaggccgaggacgagaagctggacaaggtgaagatcgccatcagcaacaaggagtggctggagtacgcccagaccagcgtgaagcacaagcggcccgccgccaccaagaaggccggccaggccaagaagaagaagggcagctacccctacgacgtgcccgactacgcctacccctacgacgtgcccgactacgcctacccctacgacgtgcccgactacgcctga

SEQ ID NO: 1021 - DNA, 3756 bp, Streptococcus mutans
  source 1..3756: mol_type = other DNA
atgtactacgagagcctgaccaagcagtaccccgtgagcaagaccatccggaacgagctgatccccatcggcaagaccctggacaacatccggcagaacaacatcctggagagcgacgtgaagcggaagcagaactacgagcacgtgaagggcatcctggacgagtaccacaagcagctgatcaacgaggccctggacaactgcaccctgcccagcctgaagatcgccgccgagatctacctgaagaaccagaaggaggtgagcgaccgggaggacttcaacaagacccaggacctgctgcggaaggaggtggtggagaagctgaaggcccacgagaacttcaccaagatcggcaagaaggacatcctggacctgctggagaagctgcccagcatcagcgaggacgactacaacgccctggagagcttccggaacttctacacctacttcaccagctacaacaaggtgcgggagaacctgtacagcgacaaggagaaaagcagcaccgtggcctaccggctgatcaacgagaacttccccaagttcctggacaacgtgaaaagctaccggttcgtgaagaccgccggcatcctggccgacggcctgggcgaggaggagcaggacagcctgttcatcgtggagaccttcaacaagaccctgacccaggacggcatcgacacctacaacagccaggtgggcaagatcaacagcagcatcaacctgtacaaccagaagaaccagaaggccaacggcttccggaagatccccaagatgaagatgctgtacaagcagatcctgagcgaccgggaggagagcttcatcgacgagttccagagcgacgaggtgctgatcgacaacgtggagagctacggcagcgtgctgatcgagagcctgaaaagcagcaaggtgagcgccttcttcgacgccctgcgggagagcaagggcaagaacgtgtacgtgaagaacgacctggccaagaccgccatgagcaacatcgtgttcgagaactggcggaccttcgacgacctgctgaaccaggagtacgacctggccaacgagaacaagaagaaggacgacaagtacttcgagaagcggcagaaggagctgaagaagaacaagagctacagcctggagcacctgtgcaacctgagcgaggacagctgcaacctgatcgagaactacatccaccagatcagcgacgacatcgagaacatcatcatcaacaacgagaccttcctgcggatcgtgatcaacgagcacgaccggagccggaagctggccaagaaccggaaggccgtgaaggccatcaaggacttcctggacagcatcaaggtgctggagcgggagctgaagctgatcaacagcagcggccaggagctggagaaggacctgatcgtgtacagcgcccacgaggagctgctggtggagctgaagcaggtggacagcctgtacaacatgacccggaactacctgaccaagaagcccttcagcaccgagaaggtgaagctgaacttcaaccggagcaccctgctgaacggctgggaccggaacaaggagaccgacaacctgggcgtgctgctgctgaaggacggcaagtactacctgggcatcatgaacaccagcgccaacaaggccttcgtgaacccccccgtggccaagaccgagaaggtgttcaagaaggtggactacaagctgctgcccgtgcccaaccagatgctgcccaaggtgttcttcgccaagagcaacatcgacttctacaaccccagcagcgagatctacagcaactacaagaagggcacccacaagaagggcaacatgttcagcctggaggactgccacaacctgatcgacttcttcaaggagagcatcagcaagcacgaggactggagcaagttcggcttcaagttcagcgacaccgccagctacaacgacatcagcgagttctaccgggaggtggagaagcagggctacaagctgacctacaccgacatcgacgagacctacatcaacgacctgatcgagcggaacgagctgtacctgttccagatctacaacaaggacttcagcatgtacagcaagggcaagctgaacctgcacaccctgtacttcatgatgctgttcgaccagcggaacatcgacgacgtggtgtacaagctgaacggcgaggccgaggtgttctaccggcccgccagcatcagcgaggacgagctgatcatccacaaggccggcgaggagatcaagaacaagaaccccaaccgggcccggaccaaggagaccagcaccttcagctacgacatcgtgaaggacaagcggtacagcaaggacaagttcaccctgcacatccccatcaccatgaacttcggcgtggacgaggtgaagcggttcaacgacgccgtgaacagcgccatccggatcgacgagaacgtgaacgtgatcggcatcgaccggggcgagcggaacctgctgtacgtggtggtgatcgacagcaagggcaacatcctggagcagatcagcctgaacagcatcatcaacaaggagtacgacatcgagaccgactaccacgccctgctggacgagcgggagggcggccgggacaaggcccggaaggactggaacaccgtggagaacatccgggacctgaaggccggctacctgagccaggtggtgaacgtggtggccaagctggtgctgaagtacaacgccatcatctgcctggaggacctgaacttcggcttcaagcggggccggcagaaggtggagaagcaggtgtaccagaagttcgagaagatgctgatcgacaagctgaactacctggtgatcgacaagagccgggagcagaccagccccaaggagctgggcggcgccctgaacgccctgcagctgaccagcaagttcaagagcttcaaggagctgggcaagcagagcggcgtgatctactacgtgcccgcctacctgaccagcaagatcgaccccaccaccggcttcgccaacctgttctacatgaagtgcgagaacgtggagaaaagcaagcggttcttcgacggcttcgacttcatccggttcaacgccctggagaacgtgttcgagttcggcttcgactaccggagcttcacccagcgggcctgcggcatcaacagcaagtggaccgtgtgcaccaacggcgagcggatcatcaagtaccggaaccccgacaagaacaacatgttcgacgagaaggtggtggtggtgaccgacgagatgaagaacctgttcgagcagtacaagatcccctacgaggacggccggaacgtgaaggacatgatcatcagcaacgaggaggccgagttctaccggcggctgtaccggctgctgcagcagaccctgcagatgcggaacagcaccagcgacggcacccgggactacatcatcagccccgtgaagaacaagcgggaggcctacttcaacagcgagctgagcgacggcagcgtgcccaaggacgccgacgccaacggcgcctacaacatcgcccggaagggcctgtgggtgctggagcagatccggcagaaaagcgagggcgagaagatcaacctggccatgaccaacgccgagtggctggagtacgcccagacccacctgctgaagcggcccgccgccaccaagaaggccggccaggccaagaagaagaagggcagctacccctacgacgtgcccgactacgcctacccctacgacgtgcccgactacgcctacccctacgacgtgcccgactacgcctga

SEQ ID NO: 1022 - RNA, 40 nt, synthetic construct
  misc_feature 1..40: note = HBG1-1 full-length gRNA
  source 1..40: mol_type = other RNA
taatttctactcttgtagatccttgtcaaggctattggtc

SEQ ID NO: 1023 - RNA, 41 nt, synthetic construct
  misc_feature 1..41: note = HBG1-1 modified full-length gRNA
  misc_feature 40: note = Modified to include 2'-O-methyl
  misc_feature 40..41: note = Linked by phosphorodithioate (PS2) bond
  misc_feature 41: note = Modified to include 2'-O-methyl
  source 1..41: mol_type = other RNA
taatttctactcttgtagatccttgtcaaggctattggtca

SEQ ID NO: 1024 - RNA, 95 nt, synthetic construct
  misc_feature 1..95: note = tSpA dead gRNA
  misc_feature 1: note = Modified to contain 2'-O-methyl
  misc_feature 1..2: note = Linked by phosphorothioate (PS) bond
  misc_feature 2..3: note = Linked by phosphorothioate (PS) bond
  misc_feature 2: note = Modified to contain 2'-O-methyl
  misc_feature 3..4: note = Linked by phosphorothioate (PS) bond
  misc_feature 3: note = Modified to contain 2'-O-methyl
  misc_feature 92..93: note = Linked by phosphorothioate (PS) bond
  misc_feature 92: note = Modified to contain 2'-O-methyl
  misc_feature 93..94: note = Linked by phosphorothioate (PS) bond
  misc_feature 93: note = Modified to contain 2'-O-methyl
  misc_feature 94..95: note = Linked by phosphorothioate (PS) bond
  misc_feature 94: note = Modified to contain 2'-O-methyl
  source 1..95: mol_type = other RNA
ggctggccaacccatgttttagagctagaaatagcaagttaaaataaggctagtccgttatcaacttgaaaaagtggcaccgagtcggtgctttt

SEQ ID NO: 1025 - RNA, 100 nt, synthetic construct; identical to SEQ ID NO: 997
  misc_feature 1..100: note = SpA full-length gRNA
  misc_feature 1: note = Modified to contain 2'-O-methyl
  misc_feature 1..2: note = Linked by phosphorothioate (PS) bond
  misc_feature 2: note = Modified to contain 2'-O-methyl
  misc_feature 2..3: note = Linked by phosphorothioate (PS) bond
  misc_feature 3: note = Modified to contain 2'-O-methyl
  misc_feature 3..4: note = Linked by phosphorothioate (PS) bond
  misc_feature 97: note = Modified to contain 2'-O-methyl
  misc_feature 97..98: note = Linked by phosphorothioate (PS) bond
  misc_feature 98: note = Modified to contain 2'-O-methyl
  misc_feature 98..99: note = Linked by phosphorothioate (PS) bond
  misc_feature 99..100: note = Linked by phosphorothioate (PS) bond
  misc_feature 99: note = Modified to contain 2'-O-methyl
  source 1..100: mol_type = other RNA

SEQ ID NO: 1026 - RNA, 100 nt, synthetic construct
  misc_feature 1..100: note = SpG full-length gRNA
  misc_feature 1: note = Modified to contain 2'-O-methyl
  misc_feature 1..2: note = Linked by phosphorothioate (PS) bond
  misc_feature 2: note = Modified to contain 2'-O-methyl
  misc_feature 2..3: note = Linked by phosphorothioate (PS) bond
  misc_feature 3: note = Modified to contain 2'-O-methyl
  misc_feature 3..4: note = Linked by phosphorothioate (PS) bond
  misc_feature 97: note = Modified to contain 2'-O-methyl
  misc_feature 97..98: note = Linked by phosphorothioate (PS) bond
  misc_feature 98: note = Modified to contain 2'-O-methyl
  misc_feature 98..99: note = Linked by phosphorothioate (PS) bond
  misc_feature 99..100: note = Linked by phosphorothioate (PS) bond
  misc_feature 99: note = Modified to contain 2'-O-methyl
  source 1..100: mol_type = other RNA
tagtcttagagtatccagtggttttagagctagaaatagcaagttaaaataaggctagtccgttatcaacttgaaaaagtggcaccgagtcggtgctttt

SEQ ID NO: 1027 - RNA, 95 nt, synthetic construct
  misc_feature 1..95: note = Sp182 dead gRNA
  misc_feature 1: note = Modified to contain 2'-O-methyl
  misc_feature 1..2: note = Linked by phosphorothioate (PS) bond
  misc_feature 2..3: note = Linked by phosphorothioate (PS) bond
  misc_feature 2: note = Modified to contain 2'-O-methyl
  misc_feature 3..4: note = Linked by phosphorothioate (PS) bond
  misc_feature 3: note = Modified to contain 2'-O-methyl
  misc_feature 92..93: note = Linked by phosphorothioate (PS) bond
  misc_feature 92: note = Modified to contain 2'-O-methyl
  misc_feature 93..94: note = Linked by phosphorothioate (PS) bond
  misc_feature 93: note = Modified to contain 2'-O-methyl
  misc_feature 94..95: note = Linked by phosphorothioate (PS) bond
  misc_feature 94: note = Modified to contain 2'-O-methyl
  source 1..95: mol_type = other RNA
ttagagtatccagtggttttagagctagaaatagcaagttaaaataaggctagtccgttatcaacttgaaaaagtggcaccgagtcggtgctttt

SEQ ID NO: 1028 - RNA, 15 nt, synthetic construct
  misc_feature 1..15: note = Sp182 dead gRNA targeting domain
  source 1..15: mol_type = other RNA
ttagagtatccagtg

SEQ ID NO: 1029 - DNA, 15 bp, synthetic construct
  misc_feature 1..15: note = Sp182 dgRNA targeting domain
  source 1..15: mol_type = other DNA
ttagagtatccagtg

SEQ ID NO: 1030 - DNA, 20 bp, synthetic construct
  misc_feature 1..20: note = SpG gRNA targeting domain
  source 1..20: mol_type = other DNA
tagtcttagagtatccagtg

SEQ ID NO: 1031 - DNA, 15 bp, synthetic construct
  misc_feature 1..15: note = tSpA dead gRNA targeting domain
  source 1..15: mol_type = other DNA
ggctggccaacccat

SEQ ID NO: 1032 - protein, 1334 aa, synthetic construct
  REGION 1..1334: note = His-AsCpf1-sNLS-sNLS H800A
  REGION 3..8: note = MISC_FEATURE - His tag
  REGION 1319..1325: note = MISC_FEATURE - sNLS
  REGION 1328..1334: note = MISC_FEATURE - sNLS
MGHHHHHHGSTQFEGFTNLYQVSKTLRFELIPQGKTLKHIQEQGFIEEDKARNDHYKELKPIIDRIYKTYADQCLQLVQLDWENLSAAIDSYRKEKTEETRNALIEEQATYRNAIHDYFIGRTDNLTDAINKRHAEIYKGLFKAELFNGKVLKQLGTVTTTEHENALLRSFDKFTTYFSGFYENRKNVFSAEDISTAIPHRIVQDNFPKFKENCHIFTRLITAVPSLREHFENVKKAIGIFVSTSIEEVFSFPFYNQLLTQTQIDLYNQLLGGISREAGTEKIKGLNEVLNLAIQKNDETAHIIASLPHRFIPLFKQILSDRNTLSFILEEFKSDEEVIQSFCKYKTLLRNENVLETAEALFNELNSIDLTHIFISHKKLETISSALCDHWDTLRNALYERRISELTGKITKSAKEKVQRSLKHEDINLQEIISAAGKELSEAFKQKTSEILSHAHAALDQPLPTTLKKQEEKEILKSQLDSLLGLYHLLDWFAVDESNEVDPEFSARLTGIKLEMEPSLSFYNKARNYATKKPYSVEKFKLNFQMPTLASGWDVNKEKNNGAILFVKNGLYYLGIMPKQKGRYKALSFEPTEKTSEGFDKMYYDYFPDAAKMIPKCSTQLKAVTAHFQTHTTPILLSNNFIEPLEITKEIYDLNNPEKEPKKFQTAYAKKTGDQKGYREALCKWIDFTRDFLSKYTKTTSIDLSSLRPSSQYKDLGEYYAELNPLLYHISFQRIAEKEIMDAVETGKLYLFQIYNKDFAKGHHGKPNLHTLYWTGLFSPENLAKTSIKLNGQAELFYRPKSRMKRMAARLGEKMLNKKLKDQKTPIPDTLYQELYDYVNHRLSHDLSDEARALLPNVITKEVSHEIIKDRRFTSDKFFFHVPITLNYQAANSPSKFNQRVNAYLKEHPETPIIGIDRGERNLIYITVIDSTGKILEQRSLNTIQQFDYQKKLDNREKERVAARQAWSVVGTIKDLKQGYLSQVIHEIVDLMIHYQAVVVLENLNFGFKSKRTGIAEKAVYQQFEKMLIDKLNCLVLKDYPAEKVGGVLNPYQLTDQFTSFAKMGTQSGFLFYVPAPYTSKIDPLTGFVDPFVWKTIKNHESRKHFLEGFDFLHYDVKTGDFILHFKMNRNLSFQRGLPGFMPAWDIVFEKNETQFDAKGTPFIAGKRIVPVIENHRFTGRYRDLYPANELIALLEEKGIVFRDGSNILPKLLENDDSHAIDTMVALIRSVLQMRNSNAATGEDYINSPVRDLNGVCFDSRFQNPEWPMDADANGAYHIALKGQLLLNHLKESKDLKLQNGISNQDWLAYIQELRNGSPKKKRKVGSPKKKRKV

SEQ ID NO: 1033 - protein, 1384 aa, synthetic construct
  REGION 1..1384: note = SpCas9WT
MKHHHHHHMPKKKRKVMDKKYSIGLDIGTNSVGWAVITDEYKVPSKKFKVLGNTDRHSIKKNLIGALLFDSGETAEATRLKRTARRRYTRRKNRICYLQEIFSNEMAKVDDSFFHRLEESFLVEEDKKHERHPIFGNIVDEVAYHEKYPTIYHLRKKLVDSTDKADLRLIYLALAHMIKFRGHFLIEGDLNPDNSDVDKLFIQLVQTYNQLFEENPINASGVDAKAILSARLSKSRRLENLIAQLPGEKKNGLFGNLIALSLGLTPNFKSNFDLAEDAKLQLSKDTYDDDLDNLLAQIGDQYADLFLAAKNLSDAILLSDILRVNTEITKAPLSASMIKRYDEHHQDLTLLKALVRQQLPEKYKEIFFDQSKNGYAGYIDGGASQEEFYKFIKPILEKMDGTEELLVKLNREDLLRKQRTFDNGSIPHQIHLGELHAILRRQEDFYPFLKDNREKIEKILTFRIPYYVGPLARGNSRFAWMTRKSEETITPWNFEEVVDKGASAQSFIERMTNFDKNLPNEKVLPKHSLLYEYFTVYNELTKVKYVTEGMRKPAFLSGEQKKAIVDLLFKTNRKVTVKQLKEDYFKKIECFDSVEISGVEDRFNASLGTYHDLLKIIKDKDFLDNEENEDILEDIVLTLTLFEDREMIEERLKTYAHLFDDKVMKQLKRRRYTGWGRLSRKLINGIRDKQSGKTILDFLKSDGFANRNFMQLIHDDSLTFKEDIQKAQVSGQGDSLHEHIANLAGSPAIKKGILQTVKVVDELVKVMGRHKPENIVIEMARENQTTQKGQKNSRERMKRIEEGIKELGSQILKEHPVENTQLQNEKLYLYYLQNGRDMYVDQELDINRLSDYDVDHIVPQSFLKDDSIDNKVLTRSDKNRGKSDNVPSEEVVKKMKNYWRQLLNAKLITQRKFDNLTKAERGGLSELDKAGFIKRQLVETRQITKHVAQILDSRMNTKYDENDKLIREVKVITLKSKLVSDFRKDFQFYKVREINNYHHAHDAYLNAVVGTALIKKYPKLESEFVYGDYKVYDVRKMIAKSEQEIGKATAKYFFYSNIMNFFKTEITLANGEIRKRPLIETNGETGEIVWDKGRDFATVRKVLSMPQVNIVKKTEVQTGGFSKESILPKRNSDKLIARKKDWDPKKYGGFDSPTVAYSVLVVAKVEKGKSKKLKSVKELLGITIMERSSFEKNPIDFLEAKGYKEVKKDLIIKLPKYSLFELENGRKRMLASAGELQKGNELALPSKYVNFLYLASHYEKLKGSPEDNEQKQLFVEQHKHYLDEIIEQISEFSKRVILADANLDKVLSAYNKHRDKPIREQAENIIHLFTLTNLGAPAAFKYFDTTIDRKRYTSTKEVLDATLIHQSITGLYETRIDLSQLGGD

SEQ ID NO: 1034 - protein, 1384 aa, synthetic construct
  REGION 1..1384: note = His-NLS-SpCas9D10A
MKHHHHHHMPKKKRKVMDKKYSIGLAIGTNSVGWAVITDEYKVPSKKFKVLGNTDRHSIKKNLIGALLFDSGETAEATRLKRTARRRYTRRKNRICYLQEIFSNEMAKVDDSFFHRLEESFLVEEDKKHERHPIFGNIVDEVAYHEKYPTIYHLRKKLVDSTDKADLRLIYLALAHMIKFRGHFLIEGDLNPDNSDVDKLFIQLVQTYNQLFEENPINASGVDAKAILSARLSKSRRLENLIAQLPGEKKNGLFGNLIALSLGLTPNFKSNFDLAEDAKLQLSKDTYDDDLDNLLAQIGDQYADLFLAAKNLSDAILLSDILRVNTEITKAPLSASMIKRYDEHHQDLTLLKALVRQQLPEKYKEIFFDQSKNGYAGYIDGGASQEEFYKFIKPILEKMDGTEELLVKLNREDLLRKQRTFDNGSIPHQIHLGELHAILRRQEDFYPFLKDNREKIEKILTFRIPYYVGPLARGNSRFAWMTRKSEETITPWNFEEVVDKGASAQSFIERMTNFDKNLPNEKVLPKHSLLYEYFTVYNELTKVKYVTEGMRKPAFLSGEQKKAIVDLLFKTNRKVTVKQLKEDYFKKIECFDSVEISGVEDRFNASLGTYHDLLKIIKDKDFLDNEENEDILEDIVLTLTLFEDREMIEERLKTYAHLFDDKVMKQLKRRRYTGWGRLSRKLINGIRDKQSGKTILDFLKSDGFANRNFMQLIHDDSLTFKEDIQKAQVSGQGDSLHEHIANLAGSPAIKKGILQTVKVVDELVKVMGRHKPENIVIEMARENQTTQKGQKNSRERMKRIEEGIKELGSQILKEHPVENTQLQNEKLYLYYLQNGRDMYVDQELDINRLSDYDVDHIVPQSFLKDDSIDNKVLTRSDKNRGKSDNVPSEEVVKKMKNYWRQLLNAKLITQRKFDNLTKAERGGLSELDKAGFIKRQLVETRQITKHVAQILDSRMNTKYDENDKLIREVKVITLKSKLVSDFRKDFQFYKVREINNYHHAHDAYLNAVVGTALIKKYPKLESEFVYGDYKVYDVRKMIAKSEQEIGKATAKYFFYSNIMNFFKTEITLANGEIRKRPLIETNGETGEIVWDKGRDFATVRKVLSMPQVNIVKKTEVQTGGFSKESILPKRNSDKLIARKKDWDPKKYGGFDSPTVAYSVLVVAKVEKGKSKKLKSVKELLGITIMERSSFEKNPIDFLEAKGYKEVKKDLIIKLPKYSLFELENGRKRMLASAGELQKGNELALPSKYVNFLYLASHYEKLKGSPEDNEQKQLFVEQHKHYLDEIIEQISEFSKRVILADANLDKVLSAYNKHRDKPIREQAENIIHLFTLTNLGAPAAFKYFDTTIDRKRYTSTKEVLDATLIHQSITGLYETRIDLSQLGGD

SEQ ID NO: 1035 - protein, 1333 aa, synthetic construct; identical to SEQ ID NO: 1001
  REGION 1..1333: note = AsCpf1 His-AsCpf1-NLS-NLS

SEQ ID NO: 1036 - protein, 1332 aa, synthetic construct
  REGION 1..1332: note = AsCpf1 S542R/K607R (AsCpf1 RR)
MKHHHHHHMPKKKRKVMTQFEGFTNLYQVSKTLRFELIPQGKTLKHIQEQGFIEEDKARNDHYKELKPIIDRIYKTYADQCLQLVQLDWENLSAAIDSYRKEKTEETRNALIEEQATYRNAIHDYFIGRTDNLTDAINKRHAEIYKGLFKAELFNGKVLKQLGTVTTTEHENALLRSFDKFTTYFSGFYENRKNVFSAEDISTAIPHRIVQDNFPKFKENCHIFTRLITAVPSLREHFENVKKAIGIFVSTSIEEVFSFPFYNQLLTQTQIDLYNQLLGGISREAGTEKIKGLNEVLNLAIQKNDETAHIIASLPHRFIPLFKQILSDRNTLSFILEEFKSDEEVIQSFCKYKTLLRNENVLETAEALFNELNSIDLTHIFISHKKLETISSALCDHWDTLRNALYERRISELTGKITKSAKEKVQRSLKHEDINLQEIISAAGKELSEAFKQKTSEILSHAHAALDQPLPTTLKKQEEKEILKSQLDSLLGLYHLLDWFAVDESNEVDPEFSARLTGIKLEMEPSLSFYNKARNYATKKPYSVEKFKLNFQMPTLARGWDVNKEKNNGAILFVKNGLYYLGIMPKQKGRYKALSFEPTEKTSEGFDKMYYDYFPDAAKMIPRCSTQLKAVTAHFQTHTTPILLSNNFIEPLEITKEIYDLNNPEKEPKKFQTAYAKKTGDQKGYREALCKWIDFTRDFLSKYTKTTSIDLSSLRPSSQYKDLGEYYAELNPLLYHISFQRIAEKEIMDAVETGKLYLFQIYNKDFAKGHHGKPNLHTLYWTGLFSPENLAKTSIKLNGQAELFYRPKSRMKRMAHRLGEKMLNKKLKDQKTPIPDTLYQELYDYVNHRLSHDLSDEARALLPNVITKEVSHEIIKDRRFTSDKFFFHVPITLNYQAANSPSKFNQRVNAYLKEHPETPIIGIDRGERNLIYITVIDSTGKILEQRSLNTIQQFDYQKKLDNREKERVAARQAWSVVGTIKDLKQGYLSQVIHEIVDLMIHYQAVVVLENLNFGFKSKRTGIAEKAVYQQFEKMLIDKLNCLVLKDYPAEKVGGVLNPYQLTDQFTSFAKMGTQSGFLFYVPAPYTSKIDPLTGFVDPFVWKTIKNHESRKHFLEGFDFLHYDVKTGDFILHFKMNRNLSFQRGLPGFMPAWDIVFEKNETQFDAKGTPFIAGKRIVPVIENHRFTGRYRDLYPANELIALLEEKGIVFRDGSNILPKLLENDDSHAIDTMVALIRSVLQMRNSNAATGEDYINSPVRDLNGVCFDSRFQNPEWPMDADANGAYHIALKGQLLLNHLKESKDLKLQNGISNQDWLAYIQELRNGPKKKRKVG

SEQ ID NO: 1037 - protein, 1332 aa, synthetic construct
  REGION 1..1332: note = AsCpf1 S542R/K548V/N552R (AsCpf1 RVR)
MKHHHHHHMPKKKRKVMTQFEGFTNLYQVSKTLRFELIPQGKTLKHIQEQGFIEEDKARNDHYKELKPIIDRIYKTYADQCLQLVQLDWENLSAAIDSYRKEKTEETRNALIEEQATYRNAIHDYFIGRTDNLTDAINKRHAEIYKGLFKAELFNGKVLKQLGTVTTTEHENALLRSFDKFTTYFSGFYENRKNVFSAEDISTAIPHRIVQDNFPKFKENCHIFTRLITAVPSLREHFENVKKAIGIFVSTSIEEVFSFPFYNQLLTQTQIDLYNQLLGGISREAGTEKIKGLNEVLNLAIQKNDETAHIIASLPHRFIPLFKQILSDRNTLSFILEEFKSDEEVIQSFCKYKTLLRNENVLETAEALFNELNSIDLTHIFISHKKLETISSALCDHWDTLRNALYERRISELTGKITKSAKEKVQRSLKHEDINLQEIISAAGKELSEAFKQKTSEILSHAHAALDQPLPTTLKKQEEKEILKSQLDSLLGLYHLLDWFAVDESNEVDPEFSARLTGIKLEMEPSLSFYNKARNYATKKPYSVEKFKLNFQMPTLARGWDVNVEKNRGAILFVKNGLYYLGIMPKQKGRYKALSFEPTEKTSEGFDKMYYDYFPDAAKMIPKCSTQLKAVTAHFQTHTTPILLSNNFIEPLEITKEIYDLNNPEKEPKKFQTAYAKKTGDQKGYREALCKWIDFTRDFLSKYTKTTSIDLSSLRPSSQYKDLGEYYAELNPLLYHISFQRIAEKEIMDAVETGKLYLFQIYNKDFAKGHHGKPNLHTLYWTGLFSPENLAKTSIKLNGQAELFYRPKSRMKRMAHRLGEKMLNKKLKDQKTPIPDTLYQELYDYVNHRLSHDLSDEARALLPNVITKEVSHEIIKDRRFTSDKFFFHVPITLNYQAANSPSKFNQRVNAYLKEHPETPIIGIDRGERNLIYITVIDSTGKILEQRSLNTIQQFDYQKKLDNREKERVAARQAWSVVGTIKDLKQGYLSQVIHEIVDLMIHYQAVVVLENLNFGFKSKRTGIAEKAVYQQFEKMLIDKLNCLVLKDYPAEKVGGVLNPYQLTDQFTSFAKMGTQSGFLFYVPAPYTSKIDPLTGFVDPFVWKTIKNHESRKHFLEGFDFLHYDVKTGDFILHFKMNRNLSFQRGLPGFMPAWDIVFEKNETQFDAKGTPFIAGKRIVPVIENHRFTGRYRDLYPANELIALLEEKGIVFRDGSNILPKLLENDDSHAIDTMVALIRSVLQMRNSNAATGEDYINSPVRDLNGVCFDSRFQNPEWPMDADANGAYHIALKGQLLLNHLKESKDLKLQNGISNQDWLAYIQELRNGPKKKRKVG

SEQ ID NO: 1038 - protein, 1334 aa, synthetic construct
  REGION 1..1334: note = His-AsCpf1-2xNLS-S542R/K607R/H800A (AsCpf1 RR-H800A)
MGHHHHHHGSTQFEGFTNLYQVSKTLRFELIPQGKTLKHIQEQGFIEEDKARNDHYKELKPIIDRIYKTYADQCLQLVQLDWENLSAAIDSYRKEKTEETRNALIEEQATYRNAIHDYFIGRTDNLTDAINKRHAEIYKGLFKAELFNGKVLKQLGTVTTTEHENALLRSFDKFTTYFSGFYENRKNVFSAEDISTAIPHRIVQDNFPKFKENCHIFTRLITAVPSLREHFENVKKAIGIFVSTSIEEVFSFPFYNQLLTQTQIDLYNQLLGGISREAGTEKIKGLNEVLNLAIQKNDETAHIIASLPHRFIPLFKQILSDRNTLSFILEEFKSDEEVIQSFCKYKTLLRNENVLETAEALFNELNSIDLTHIFISHKKLETISSALCDHWDTLRNALYERRISELTGKITKSAKEKVQRSLKHEDINLQEIISAAGKELSEAFKQKTSEILSHAHAALDQPLPTTLKKQEEKEILKSQLDSLLGLYHLLDWFAVDESNEVDPEFSARLTGIKLEMEPSLSFYNKARNYATKKPYSVEKFKLNFQMPTLARGWDVNKEKNNGAILFVKNGLYYLGIMPKQKGRYKALSFEPTEKTSEGFDKMYYDYFPDAAKMIPRCSTQLKAVTAHFQTHTTPILLSNNFIEPLEITKEIYDLNNPEKEPKKFQTAYAKKTGDQKGYREALCKWIDFTRDFLSKYTKTTSIDLSSLRPSSQYKDLGEYYAELNPLLYHISFQRIAEKEIMDAVETGKLYLFQIYNKDFAKGHHGKPNLHTLYWTGLFSPENLAKTSIKLNGQAELFYRPKSRMKRMAARLGEKMLNKKLKDQKTPIPDTLYQELYDYVNHRLSHDLSDEARALLPNVITKEVSHEIIKDRRFTSDKFFFHVPITLNYQAANSPSKFNQRVNAYLKEHPETPIIGIDRGERNLIYITVIDSTGKILEQRSLNTIQQFDYQKKLDNREKERVAARQAWSVVGTIKDLKQGYLSQVIHEIVDLMIHYQAVVVLENLNFGFKSKRTGIAEKAVYQQFEKMLIDKLNCLVLKDYPAEKVGGVLNPYQLTDQFTSFAKMGTQSGFLFYVPAPYTSKIDPLTGFVDPFVWKTIKNHESRKHFLEGFDFLHYDVKTGDFILHFKMNRNLSFQRGLPGFMPAWDIVFEKNETQFDAKGTPFIAGKRIVPVIENHRFTGRYRDLYPANELIALLEEKGIVFRDGSNILPKLLENDDSHAIDTMVALIRSVLQMRNSNAATGEDYINSPVRDLNGVCFDSRFQNPEWPMDADANGAYHIALKGQLLLNHLKESKDLKLQNGISNQDWLAYIQELRNGSPKKKRKVGSPKKKRKV

SEQ ID NO: 1039 - protein, 1334 aa, synthetic construct
  REGION 1..1334: note = His-AsCpf1-2xNLS-S542R-K548V-N552R-H800A (Cpf1 RVR H800A)
MGHHHHHHGSTQFEGFTNLYQVSKTLRFELIPQGKTLKHIQEQGFIEEDKARNDHYKELKPIIDRIYKTYADQCLQLVQLDWENLSAAIDSYRKEKTEETRNALIEEQATYRNAIHDYFIGRTDNLTDAINKRHAEIYKGLFKAELFNGKVLKQLGTVTTTEHENALLRSFDKFTTYFSGFYENRKNVFSAEDISTAIPHRIVQDNFPKFKENCHIFTRLITAVPSLREHFENVKKAIGIFVSTSIEEVFSFPFYNQLLTQTQIDLYNQLLGGISREAGTEKIKGLNEVLNLAIQKNDETAHIIASLPHRFIPLFKQILSDRNTLSFILEEFKSDEEVIQSFCKYKTLLRNENVLETAEALFNELNSIDLTHIFISHKKLETISSALCDHWDTLRNALYERRISELTGKITKSAKEKVQRSLKHEDINLQEIISAAGKELSEAFKQKTSEILSHAHAALDQPLPTTLKKQEEKEILKSQLDSLLGLYHLLDWFAVDESNEVDPEFSARLTGIKLEMEPSLSFYNKARNYATKKPYSVEKFKLNFQMPTLARGWDVNVEKNRGAILFVKNGLYYLGIMPKQKGRYKALSFEPTEKTSEGFDKMYYDYFPDAAKMIPKCSTQLKAVTAHFQTHTTPILLSNNFIEPLEITKEIYDLNNPEKEPKKFQTAYAKKTGDQKGYREALCKWIDFTRDFLSKYTKTTSIDLSSLRPSSQYKDLGEYYAELNPLLYHISFQRIAEKEIMDAVETGKLYLFQIYNKDFAKGHHGKPNLHTLYWTGLFSPENLAKTSIKLNGQAELFYRPKSRMKRMAARLGEKMLNKKLKDQKTPIPDTLYQELYDYVNHRLSHDLSDEARALLPNVITKEVSHEIIKDRRFTSDKFFFHVPITLNYQAANSPSKFNQRVNAYLKEHPETPIIGIDRGERNLIYITVIDSTGKILEQRSLNTIQQFDYQKKLDNREKERVAARQAWSVVGTIKDLKQGYLSQVIHEIVDLMIHYQAVVVLENLNFGFKSKRTGIAEKAVYQQFEKMLIDKLNCLVLKDYPAEKVGGVLNPYQLTDQFTSFAKMGTQSGFLFYVPAPYTSKIDPLTGFVDPFVWKTIKNHESRKHFLEGFDFLHYDVKTGDFILHFKMNRNLSFQRGLPGFMPAWDIVFEKNETQFDAKGTPFIAGKRIVPVIENHRFTGRYRDLYPANELIALLEEKGIVFRDGSNILPKLLENDDSHAIDTMVALIRSVLQMRNSNAATGEDYINSPVRDLNGVCFDSRFQNPEWPMDADANGAYHIALKGQLLLNHLKESKDLKLQNGISNQDWLAYIQELRNGSPKKKRKVGSPKKKRKV

SEQ ID NO: 1040 - DNA, 100 bp, synthetic construct
  misc_feature 1..100: note = Ptx ssODN 18nt - positive strand (OLI16431)
  misc_feature 1..2: note = Linked by phosphorothioate (PS) bond
  misc_feature 99..100: note = Linked by phosphorothioate (PS) bond
  source 1..100: mol_type = other DNA
ccctggcctcactggatactctaagactattggtcaagtttgccttgtcaaggctggccaacccatgggtggagtttagccagggaccgtttcagacaga

SEQ ID NO: 1041 - RNA, 40 nt, synthetic construct; identical to SEQ ID NO: 1022
  misc_feature 1..40: note = gRNA
  misc_feature 39: note = Modified to contain 2'-O-methyl
  misc_feature 39..40: note = Linked by phosphorodithioate (PS2) bond
  misc_feature 40: note = Modified to contain 2'-O-methyl
  source 1..40: mol_type = other RNA

SEQ ID NO: 1042 - RNA, 45 nt, synthetic construct
  misc_feature 1..45: note = gRNA
  source 1..45: mol_type = other RNA
ctttttaatttctactcttgtagatccttgtcaaggctattggtc

SEQ ID NO: 1043 - RNA, 50 nt, synthetic construct
  misc_feature 1..50: note = gRNA
  source 1..50: mol_type = other RNA
aagacctttttaatttctactcttgtagatccttgtcaaggctattggtc

SEQ ID NO: 1044 - RNA, 65 nt, synthetic construct
  misc_feature 1..65: note = gRNA
  source 1..65: mol_type = other RNA
atgtgtttttgtcaaaagacctttttaatttctactcttgtagatccttgtcaaggctattggtc

SEQ ID NO: 1045 - RNA, 100 nt, synthetic construct
  misc_feature 1..100: note = gRNA
  source 1..100: mol_type = other RNA
aggccagcttgccggttttttagtcgtgctgcttcatgtgtttttgtcaaaagacctttttaatttctactcttgtagatccttgtcaaggctattggtc

SEQ ID NO: 1046 - DNA, 45 bp, synthetic construct
  misc_feature 1..45: note = gRNA
  misc_feature 1..5: note = DNA nucleotides
  misc_feature 6..45: note = RNA nucleotides
  source 1..45: mol_type = other DNA
ctttttaatttctactcttgtagatccttgtcaaggctattggtc

SEQ ID NO: 1047 - DNA, 50 bp, synthetic construct
  misc_feature 1..50: note = gRNA
  misc_feature 1..10: note = DNA nucleotides
  misc_feature 11..50: note = RNA nucleotides
  source 1..50: mol_type = other DNA
aagacctttttaatttctactcttgtagatccttgtcaaggctattggtc

SEQ ID NO: 1048 - DNA, 65 bp, synthetic construct
  misc_feature 1..65: note = gRNA
  misc_feature 1..25: note = DNA nucleotides
  misc_feature 26..65: note = RNA nucleotides
  source 1..65: mol_type = other DNA
atgtgtttttgtcaaaagacctttttaatttctactcttgtagatccttgtcaaggctattggtc

SEQ ID NO: 1049 - DNA, 100 bp, synthetic construct
  misc_feature 1..100: note = gRNA
  misc_feature 1..60: note = DNA nucleotides
  misc_feature 61..100: note = RNA nucleotides
  source 1..100: mol_type = other DNA
aggccagcttgccggttttttagtcgtgctgcttcatgtgtttttgtcaaaagacctttttaatttctactcttgtagatccttgtcaaggctattggtc

SEQ ID NO: 1050 - DNA, 66 bp, synthetic construct
  misc_feature 1..66: note = gRNA
  misc_feature 1..25: note = DNA nucleotides
  misc_feature 26..66: note = RNA nucleotides
  misc_feature 65: note = Modified to contain 2'-O-methyl
  misc_feature 65..66: note = Linked by phosphorodithioate (PS2) bond
  misc_feature 66: note = Modified to contain 2'-O-methyl
  source 1..66: mol_type = other DNA
atgtgtttttgtcaaaagacctttttaatttctactcttgtagatccttgtcaaggctattggtca

SEQ ID NO: 1051 - DNA, 66 bp, synthetic construct; identical to SEQ ID NO: 1050
  misc_feature 1..66: note = gRNA
  misc_feature 1..25: note = DNA nucleotides
  misc_feature 26..66: note = RNA nucleotides
  misc_feature 65..66: note = Linked by phosphorothioate (PS) bond
  misc_feature 66: note = Modified to contain 2'-O-methyl
  source 1..66: mol_type = other DNA

SEQ ID NO: 1052 - DNA, 60 bp, synthetic construct
  misc_feature 1..60: note = gRNA
  misc_feature 1..20: note = DNA nucleotides
  misc_feature 21..60: note = RNA nucleotides
  source 1..60: mol_type = other DNA
tttttgtcaaaagacctttttaatttctactcttgtagatccttgtcaaggctattggtc

SEQ ID NO: 1053 - DNA, 70 bp, synthetic construct
  misc_feature 1..70: note = gRNA
  misc_feature 1..30: note = DNA nucleotides
  misc_feature 31..70: note = RNA nucleotides
  source 1..70: mol_type = other DNA
gcttcatgtgtttttgtcaaaagacctttttaatttctactcttgtagatccttgtcaaggctattggtc

SEQ ID NO: 1054 - DNA, 90 bp, synthetic construct
  misc_feature 1..90: note = gRNA
  misc_feature 1..50: note = DNA nucleotides
  misc_feature 51..90: note = RNA nucleotides
  source 1..90: mol_type = other DNA
gccggttttttagtcgtgctgcttcatgtgtttttgtcaaaagacctttttaatttctactcttgtagatccttgtcaaggctattggtc

SEQ ID NO: 1055 - DNA, 80 bp, synthetic construct
  misc_feature 1..80: note = gRNA
  misc_feature 1..40: note = DNA nucleotides
  misc_feature 41..80: note = RNA nucleotides
  source 1..80: mol_type = other DNA
tagtcgtgctgcttcatgtgtttttgtcaaaagacctttttaatttctactcttgtagatccttgtcaaggctattggtc

SEQ ID NO: 1056 - DNA, 60 bp, synthetic construct
  misc_feature 1..60: note = gRNA
  misc_feature 1..20: note = DNA nucleotides
  misc_feature 1..2: note = Linked by phosphorothioate (PS) bond
  misc_feature 2..3: note = Linked by phosphorothioate (PS) bond
  misc_feature 21..60: note = RNA nucleotides
  source 1..60: mol_type = other DNA
ccgaagttttcttcggtttttaatttctactcttgtagatccttgtcaaggctattggtc

SEQ ID NO: 1057 - DNA, 65 bp, synthetic construct
  misc_feature 1..65: note = gRNA
  misc_feature 1..25: note = DNA nucleotides
  misc_feature 1..2: note = Linked by phosphorothioate (PS) bond
  misc_feature 2..3: note = Linked by phosphorothioate (PS) bond
  misc_feature 26..65: note = RNA nucleotides
  source 1..65: mol_type = other DNA
tttttccgaagttttcttcggtttttaatttctactcttgtagatccttgtcaaggctattggtc

SEQ ID NO: 1058 - DNA, 70 bp, synthetic construct
  misc_feature 1..70: note = gRNA
  misc_feature 1..30: note = DNA nucleotides
  misc_feature 1..2: note = Linked by phosphorothioate (PS) bond
  misc_feature 2..3: note = Linked by phosphorothioate (PS) bond
  misc_feature 31..70: note = RNA nucleotides
  source 1..70: mol_type = other DNA
aacgctttttccgaagttttcttcggtttttaatttctactcttgtagatccttgtcaaggctattggtc

SEQ ID NO: 1059 - DNA, 81 bp, synthetic construct
  misc_feature 1..81: note = gRNA
  misc_feature 1..41: note = DNA nucleotides
  misc_feature 1..2: note = Linked by phosphorothioate (PS) bond
  misc_feature 2..3: note = Linked by phosphorothioate (PS) bond
  misc_feature 42..81: note = RNA nucleotides
  source 1..81: mol_type = other DNA
gcgttgttttcaacgctttttccgaagttttcttcggtttttaatttctactcttgtagatccttgtcaaggctattggtc

SEQ ID NO: 1060 - DNA, 102 bp, synthetic construct
  misc_feature 1..102: note = gRNA
  misc_feature 1..62: note = DNA nucleotides
  misc_feature 1..2: note = Linked by phosphorothioate (PS) bond
  misc_feature 2..3: note = Linked by phosphorothioate (PS) bond
  misc_feature 63..102: note = RNA nucleotides
  source 1..102: mol_type = other DNA
ggcttcttttgaagcctttttgcgttgttttcaacgctttttccgaagttttcttcggtttttaatttctactcttgtagatccttgtcaaggctattggtc

SEQ ID NO: 1061 - RNA, 40 nt, synthetic construct; identical to SEQ ID NO: 1022
  misc_feature 1..40: note = gRNA
  misc_feature 1: note = Modified to contain 2'-O-methyl
  source 1..40: mol_type = other RNA

SEQ ID NO: 1062 - RNA, 40 nt, synthetic construct; identical to SEQ ID NO: 1022
  misc_feature 1..40: note = gRNA
  misc_feature 1: note = Modified to contain 2'-O-methyl
  misc_feature 1..2: note = Linked by phosphorothioate (PS) bond
  source 1..40: mol_type = other RNA

SEQ ID NO: 1063 - RNA, 40 nt, synthetic construct; identical to SEQ ID NO: 1022
  misc_feature 1..40: note = gRNA
  misc_feature 1: note = Modified to contain 2'-O-methyl
  misc_feature 2: note = Modified to contain 2'-O-methyl
  source 1..40: mol_type = other RNA

SEQ ID NO: 1064 - RNA, 40 nt, synthetic construct; identical to SEQ ID NO: 1022
  misc_feature 1..40: note = gRNA
  misc_feature 1: note = Modified to contain 2'-O-methyl
  misc_feature 1..2: note = Linked by phosphorothioate (PS) bond
  misc_feature 2: note = Modified to contain 2'-O-methyl
  source 1..40: mol_type = other RNA

SEQ ID NO: 1065 - RNA, 40 nt, synthetic construct; identical to SEQ ID NO: 1022
  misc_feature 1..40: note = gRNA
  misc_feature 1: note = Modified to contain 2'-O-methyl
  misc_feature 2: note = Modified to contain 2'-O-methyl
  misc_feature 3: note = Modified to contain 2'-O-methyl
  source 1..40: mol_type = other RNA

SEQ ID NO: 1066 - RNA, 40 nt, synthetic construct; identical to SEQ ID NO: 1022
  misc_feature 1..40: note = gRNA
  misc_feature 1: note = Modified to contain 2'-O-methyl
  misc_feature 1..2: note = Linked by phosphorothioate (PS) bond
  misc_feature 2..3: note = Linked by phosphorothioate (PS) bond
  misc_feature 2: note = Modified to contain 2'-O-methyl
  misc_feature 3..4: note = Linked by phosphorothioate (PS) bond
  misc_feature 3: note = Modified to contain 2'-O-methyl
  source 1..40: mol_type = other RNA

SEQ ID NO: 1067 - DNA, 65 bp, synthetic construct; identical to SEQ ID NO: 1048
  misc_feature 1..65: note = gRNA
  misc_feature 1..25: note = DNA nucleotides
  misc_feature 1..2: note = Linked by phosphorothioate (PS) bond
  misc_feature 2..3: note = Linked by phosphorothioate (PS) bond
  misc_feature 26..65: note = RNA nucleotides
  source 1..65: mol_type = other DNA

SEQ ID NO: 1068 - DNA, 66 bp, synthetic construct; identical to SEQ ID NO: 1050
  misc_feature 1..66: note = gRNA
  misc_feature 1..25: note = DNA nucleotides
  misc_feature 1..2: note = Linked by phosphorothioate (PS) bond
  misc_feature 2..3: note = Linked by phosphorothioate (PS) bond
  misc_feature 26..66: note = RNA nucleotides
  misc_feature 65..66: note = Linked by phosphorothioate (PS) bond
  misc_feature 66: note = Modified to contain 2'-O-methyl
  source 1..66: mol_type = other DNA

SEQ ID NO: 1069 - RNA, 41 nt, synthetic construct; identical to SEQ ID NO: 1023
  misc_feature 1..41: note = gRNA
  misc_feature 40..41: note = Linked by phosphorothioate (PS) bond
  misc_feature 41: note = Modified to contain 2'-O-methyl
  source 1..41: mol_type = other RNA

SEQ ID NO: 1070 - RNA, 42 nt, synthetic construct
  misc_feature 1..42: note = gRNA
  misc_feature 41: note = Modified to contain 2'-O-methyl
  misc_feature 41..42: note = Linked by phosphorothioate (PS) bond
  source 1..42: mol_type = other RNA
taatttctactcttgtagatccttgtcaaggctattggtcat

SEQ ID NO: 1071 - RNA, 41 nt, synthetic construct
  misc_feature 1..41: note = gRNA
  source 1..41: mol_type = other RNA
taatttctactcttgtagatccttgtcaaggctattggtct

SEQ ID NO: 1072 - RNA, 42 nt, synthetic construct; identical to SEQ ID NO: 1070
  misc_feature 1..42: note = gRNA
  source 1..42: mol_type = other RNA

SEQ ID NO: 1073 - RNA, 44 nt, synthetic construct
  misc_feature 1..44: note = gRNA
  source 1..44: mol_type = other RNA
taatttctactcttgtagatccttgtcaaggctattggtcaagt

SEQ ID NO: 1074 - DNA, 66 bp, synthetic construct
  misc_feature 1..66: note = gRNA
  misc_feature 1..25: note = DNA nucleotides
  misc_feature 1..2: note = Linked by phosphorothioate (PS) bond
  misc_feature 2..3: note = Linked by phosphorothioate (PS) bond
  misc_feature 26..66: note = RNA nucleotides
  source 1..66: mol_type = other DNA
atgtgtttttgtcaaaagacctttttaatttctactcttgtagatccttgtcaaggctattggtct

SEQ ID NO: 1075 - DNA, 69 bp, synthetic construct
  misc_feature 1..69: note = gRNA
  misc_feature 1..25: note = DNA nucleotides
  misc_feature 1..2: note = Linked by phosphorothioate (PS) bond
  misc_feature 2..3: note = Linked by phosphorothioate (PS) bond
  misc_feature 26..69: note = RNA nucleotides
  source 1..69: mol_type = other DNA
atgtgtttttgtcaaaagacctttttaatttctactcttgtagatccttgtcaaggctattggtcaagt

SEQ ID NO: 1076 - RNA, 41 nt, synthetic construct; identical to SEQ ID NO: 1023
  misc_feature 1..41: note = gRNA
  source 1..41: mol_type = other RNA

SEQ ID NO: 1077 - RNA, 43 nt, synthetic construct
  misc_feature 1..43: note = gRNA
  source 1..43: mol_type = other RNA
taatttctactcttgtagatccttgtcaaggctattggtcaag

SEQ ID NO: 1078 - DNA, 68 bp, synthetic construct
  misc_feature 1..68: note = gRNA
  misc_feature 1..25: note = DNA nucleotides
  misc_feature 1..2: note = Linked by phosphorothioate (PS) bond
  misc_feature 2..3: note = Linked by phosphorothioate (PS) bond
  misc_feature 26..68: note = RNA nucleotides
  source 1..68: mol_type = other DNA
atgtgtttttgtcaaaagacctttttaatttctactcttgtagatccttgtcaaggctattggtcaag

SEQ ID NO: 1079 - RNA, 44 nt, synthetic construct
  misc_feature 1..44: note = gRNA
  source 1..44: mol_type = other RNA
taatttctactcttgtagatccttgtcaaggctattggtctttt

SEQ ID NO: 1080 - RNA, 44 nt, synthetic construct; identical to SEQ ID NO: 1079
  misc_feature 1..44: note = gRNA
  misc_feature 41: note = Modified to contain 2'-O-methyl
  misc_feature 41..42: note = Linked by phosphorothioate (PS) bond
  misc_feature 42..43: note = Linked by phosphorothioate (PS) bond
  misc_feature 42: note = Modified to contain 2'-O-methyl
  misc_feature 43: note = Modified to contain 2'-O-methyl
  misc_feature 43..44: note = Linked by phosphorothioate (PS) bond
  source 1..44: mol_type = other RNA

SEQ ID NO: 1081 - DNA, 69 bp, synthetic construct
  misc_feature 1..69: note = gRNA
  misc_feature 1..25: note = DNA nucleotides
  misc_feature 1..2: note = Linked by phosphorothioate (PS) bond
  misc_feature 2..3: note = Linked by phosphorothioate (PS) bond
  misc_feature 26..69: note = RNA nucleotides
  source 1..69: mol_type = other DNA
atgtgtttttgtcaaaagacctttttaatttctactcttgtagatccttgtcaaggctattggtctttt

SEQ ID NO: 1082 - DNA, 66 bp, synthetic construct
  misc_feature 1..66: note = gRNA
  misc_feature 1..25: note = DNA nucleotides
  misc_feature 26..66: note = RNA nucleotides
  misc_feature 65..66: note = Linked by phosphorothioate (PS) bond
  misc_feature 66: note = Modified to contain 2'-O-methyl
  source 1..66: mol_type = other DNA
aaaaaaaaaaaaaaaaaaaaaaaaataatttctactcttgtagatccttgtcaaggctattggtca

SEQ ID NO: 1083 - DNA, 66 bp, synthetic construct
  misc_feature 1..66: note = gRNA
  misc_feature 1..25: note = DNA nucleotides
  misc_feature 26..66: note = RNA nucleotides
  misc_feature 65..66: note = Linked by phosphorothioate (PS) bond
  misc_feature 66: note = Modified to contain 2'-O-methyl
  source 1..66: mol_type = other DNA
ttttttttttttttttttttttttttaatttctactcttgtagatccttgtcaaggctattggtca

SEQ ID NO: 1084 - DNA, 61 bp, synthetic construct
  misc_feature 1..61: note = gRNA
  misc_feature 1..20: note = DNA nucleotides
  misc_feature 1..2: note = Linked by phosphorothioate (PS) bond
  misc_feature 2..3: note = Linked by phosphorothioate (PS) bond
  misc_feature 21..61: note = RNA nucleotides
  misc_feature 60..61: note = Linked by phosphorothioate (PS) bond
  misc_feature 61: note = Modified to contain 2'-O-methyl
  source 1..61: mol_type = other DNA
ccgaagttttcttcggtttttaatttctactcttgtagatccttgtcaaggctattggtca

SEQ ID NO: 1085 - RNA, 41 nt, synthetic construct
  misc_feature 1..41: note = gRNA
  misc_feature 40..41: note = Linked by phosphorothioate (PS) bond
  misc_feature 41: note = Modified to contain 2'-O-methyl
  source 1..41: mol_type = other RNA
taatttctactcttgtagatagacagatatttgcattgaga

SEQ ID NO: 1086 - DNA, 66 bp, synthetic construct
  misc_feature 1..66: note = gRNA
  misc_feature 1..25: note = DNA nucleotides
  misc_feature 26..66: note = RNA nucleotides
  misc_feature 65..66: note = Linked by phosphorothioate (PS) bond
  misc_feature 66: note = Modified to contain 2'-O-methyl
  source 1..66: mol_type = other DNA
atgtgtttttgtcaaaagacctttttaatttctactcttgtagatagacagatatttgcattgaga

SEQ ID NO: 1087 - DNA, 61 bp, synthetic construct
  misc_feature 1..61: note = gRNA
  misc_feature 1..20: note = DNA nucleotides
  misc_feature 1..2: note = Linked by phosphorothioate (PS) bond
  misc_feature 2..3: note = Linked by phosphorothioate (PS) bond
  misc_feature 21..61: note = RNA nucleotides
  misc_feature 60..61: note = Linked by phosphorothioate (PS) bond
  misc_feature 61: note = Modified to contain 2'-O-methyl
  source 1..61: mol_type = other DNA
ccgaagttttcttcggtttttaatttctactcttgtagatagacagatatttgcattgaga

SEQ ID NO: 1088 - RNA, 41 nt, synthetic construct
  misc_feature 1..41: note = gRNA
  misc_feature 40..41: note = Linked by phosphorothioate (PS) bond
  misc_feature 41: note = Modified to contain 2'-O-methyl
  source 1..41: mol_type = other RNA
taatttctactcttgtagatcattgagatagtgtggggaag

SEQ ID NO: 1089 - DNA, 66 bp, synthetic construct
  misc_feature 1..66: note = gRNA
  misc_feature 1..25: note = DNA nucleotides
  misc_feature 26..66: note = RNA nucleotides
  misc_feature 65..66: note = Linked by phosphorothioate (PS) bond
  misc_feature 66: note = Modified to contain 2'-O-methyl
  source 1..66: mol_type = other DNA
atgtgtttttgtcaaaagacctttttaatttctactcttgtagatcattgagatagtgtggggaag

SEQ ID NO: 1090 - DNA, 61 bp, synthetic construct
  misc_feature 1..61: note = gRNA
  misc_feature 1..20: note = DNA nucleotides
  misc_feature 1..2: note = Linked by phosphorothioate (PS) bond
  misc_feature 2..3: note = Linked by phosphorothioate (PS) bond
  misc_feature 21..61: note = RNA nucleotides
  misc_feature 60..61: note = Linked by phosphorothioate (PS) bond
  misc_feature 61: note = Modified to contain 2'-O-methyl
  source 1..61: mol_type = other DNA
ccgaagttttcttcggtttttaatttctactcttgtagatcattgagatagtgtggggaag

SEQ ID NO: 1091 - RNA, 41 nt, synthetic construct
  misc_feature 1..41: note = gRNA
  misc_feature 40..41: note = Linked by phosphorothioate (PS) bond
  misc_feature 41: note = Modified to contain 2'-O-methyl
  source 1..41: mol_type = other RNA
taatttctactcttgtagatcttctcccatcatagaggata

SEQ ID NO: 1092 - DNA, 66 bp, synthetic construct
  misc_feature 1..66: note = gRNA
  misc_feature 1..25: note = DNA nucleotides
  misc_feature 26..66: note = RNA nucleotides
  misc_feature 65..66: note = Linked by phosphorothioate (PS) bond
  misc_feature 66: note = Modified to contain 2'-O-methyl
  source 1..66: mol_type = other DNA
atgtgtttttgtcaaaagacctttttaatttctactcttgtagatcttctcccatcatagaggata

SEQ ID NO: 1093 - DNA, 61 bp, synthetic construct
  misc_feature 1..61: note = gRNA
  misc_feature 1..20: note = DNA nucleotides
  misc_feature 1..2: note = Linked by phosphorothioate (PS) bond
  misc_feature 2..3: note = Linked by phosphorothioate (PS) bond
  misc_feature 21..61: note = RNA nucleotides
  misc_feature 60..61: note = Linked by phosphorothioate (PS) bond
  misc_feature 61: note = Modified to contain 2'-O-methyl
  source 1..61: mol_type = other DNA
ccgaagttttcttcggtttttaatttctactcttgtagatcttctcccatcatagaggata

SEQ ID NO: 1094 - protein, 1363 aa, synthetic construct
  REGION 1..1363: note = Cpf1
  REGION 1310..1331: note = MISC_FEATURE - NLS
  REGION 1358..1363: note = MISC_FEATURE - His tag
MTQFEGFTNLYQVSKTLRFELIPQGKTLKHIQEQGFIEEDKARNDHYKELKPIIDRIYKTYADQCLQLVQLDWENLSAAIDSYRKEKTEETRNALIEEQATYRNAIHDYFIGRTDNLTDAINKRHAEIYKGLFKAELFNGKVLKQLGTVTTTEHENALLRSFDKFTTYFSGFYENRKNVFSAEDISTAIPHRIVQDNFPKFKENCHIFTRLITAVPSLREHFENVKKAIGIFVSTSIEEVFSFPFYNQLLTQTQIDLYNQLLGGISREAGTEKIKGLNEVLNLAIQKNDETAHIIASLPHRFIPLFKQILSDRNTLSFILEEFKSDEEVIQSFCKYKTLLRNENVLETAEALFNELNSIDLTHIFISHKKLETISSALCDHWDTLRNALYERRISELTGKITKSAKEKVQRSLKHEDINLQEIISAAGKELSEAFKQKTSEILSHAHAALDQPLPTTLKKQEEKEILKSQLDSLLGLYHLLDWFAVDESNEVDPEFSARLTGIKLEMEPSLSFYNKARNYATKKPYSVEKFKLNFQRPTLASGWDVNKEKNNGAILFVKNGLYYLGIMPKQKGRYKALSFEPTEKTSEGFDKMYYDYFPDAAKMIPKCSTQLKAVTAHFQTHTTPILLSNNFIEPLEITKEIYDLNNPEKEPKKFQTAYAKKTGDQKGYREALCKWIDFTRDFLSKYTKTTSIDLSSLRPSSQYKDLGEYYAELNPLLYHISFQRIAEKEIMDAVETGKLYLFQIYNKDFAKGHHGKPNLHTLYWTGLFSPENLAKTSIKLNGQAELFYRPKSRMKRMAHRLGEKMLNKKLKDQKTPIPDTLYQELYDYVNHRLSHDLSDEARALLPNVITKEVSHEIIKDRRFTSDKFLFHVPITLNYQAANSPSKFNQRVNAYLKEHPETPIIGIDRGERNLIYITVIDSTGKILEQRSLNTIQQFDYQKKLDNREKERVAARQAWSVVGTIKDLKQGYLSQVIHEIVDLMIHYQAVVVLENLNFGFKSKRTGIAEKAVYQQFEKMLIDKLNCLVLKDYPAEKVGGVLNPYQLTDQFTSFAKMGTQSGFLFYVPAPYTSKIDPLTGFVDPFVWKTIKNHESRKHFLEGFDFLHYDVKTGDFILHFKMNRNLSFQRGLPGFMPAWDIVFEKNETQFDAKGTPFIAGKRIVPVIENHRFTGRYRDLYPANELIALLEEKGIVFRDGSNILPKLLENDDSHAIDTMVALIRSVLQMRNSNAATGEDYINSPVRDLNGVCFDSRFQNPEWPMDADANGAYHIALKGQLLLNHLKESKDLKLQNGISNQDWLAYIQELRNGRSSDDEATADSQHAAPPKKKRKVGGSGGSGGSGGSGGSGGSGGSGGSLEHHHHHH

SEQ ID NO: 1095 - protein, 1363 aa, synthetic construct
  REGION 1..1363: note = Cpf1
  REGION 1310..1331: note = MISC_FEATURE - NLS
  REGION 1358..1363: note = MISC_FEATURE - His tag
MTQFEGFTNLYQVSKTLRFELIPQGKTLKHIQEQGFIEEDKARNDHYKELKPIIDRIYKTYADQCLQLVQLDWENLSAAIDSYRKEKTEETRNALIEEQATYRNAIHDYFIGRTDNLTDAINKRHAEIYKGLFKAELFNGKVLKQLGTVTTTEHENALLRSFDKFTTYFSGFYENRKNVFSAEDISTAIPHRIVQDNFPKFKENCHIFTRLITAVPSLREHFENVKKAIGIFVSTSIEEVFSFPFYNQLLTQTQIDLYNQLLGGISREAGTEKIKGLNEVLNLAIQKNDETAHIIASLPHRFIPLFKQILSDRNTLSFILEEFKSDEEVIQSFCKYKTLLRNENVLETAEALFNELNSIDLTHIFISHKKLETISSALCDHWDTLRNALYERRISELTGKITKSAKEKVQRSLKHEDINLQEIISAAGKELSEAFKQKTSEILSHAHAALDQPLPTTLKKQEEKEILKSQLDSLLGLYHLLDWFAVDESNEVDPEFSARLTGIKLEMEPSLSFYNKARNYATKKPYSVEKFKLNFQMPTLASGWDVNKEKNNGAILFVKNGLYYLGIMPKQKGRYKALSFEPTEKTSEGFDKMYYDYFPDAAKMIPKCSTQLKAVTAHFQTHTTPILLSNNFIEPLEITKEIYDLNNPEKEPKKFQTAYAKKTGDQKGYREALCKWIDFTRDFLSKYTKTTSIDLSSLRPSSQYKDLGEYYAELNPLLYHISFQRIAEKEIMDAVETGKLYLFQIYNKDFAKGHHGKPNLHTLYWTGLFSPENLAKTSIKLNGQAELFYRPKSRMKRMAHRLGEKMLNKKLKDQKTPIPDTLYQELYDYVNHRLSHDLSDEARALLPNVITKEVSHEIIKDRRFTSDKFFFHVPITLNYQAANSPSKFNQRVNAYLKEHPETPIIGIDRGERNLIYITVIDSTGKILEQRSLNTIQQFDYQKKLDNREKERVAARQAWSVVGTIKDLKQGYLSQVIHEIVDLMIHYQAVVVLENLNFGFKSKRTGIAEKAVYQQFEKMLIDKLNCLVLKDYPAEKVGGVLNPYQLTDQFTSFAKMGTQSGFLFYVPAPYTSKIDPLTGFVDPFVWKTIKNHESRKHFLEGFDFLHYDVKTGDFILHFKMNRNLSFQRGLPGFMPAWDIVFEKNETQFDAKGTPFIAGKRIVPVIENHRFTGRYRDLYPANELIALLEEKGIVFRDGSNILPKLLENDDSHAIDTMVALIRSVLQMRNSNAATGEDYINSPVRDLNGVCFDSRFQNPEWPMDADANGAYHIALKGQLLLNHLKESKDLKLQNGISNQDWLAYIQELRNGRSSDDEATADSQHAAPPKKKRKVGGSGGSGGSGGSGGSGGSGGSGGSLEHHHHHH

SEQ ID NO: 1096 - protein, 1363 aa, synthetic construct
  REGION 1..1363: note = Cpf1
  REGION 1310..1331: note = MISC_FEATURE - NLS
  REGION 1358..1363: note = MISC_FEATURE - His tag
MTQFEGFTNLYQVSKTLRFELIPQGKTLKHIQEQGFIEEDKARNDHYKELKPIIDRIYKTYADQCLQLVQLDWENLSAAIDSYRKEKTEETRNALIEEQATYRNAIHDYFIGRTDNLTDAINKRHAEIYKGLFKAELFNGKVLKQLGTVTTTEHENALLRSFDKFTTYFSGFYENRKNVFSAEDISTAIPHRIVQDNFPKFKENCHIFTRLITAVPSLREHFENVKKAIGIFVSTSIEEVFSFPFYNQLLTQTQIDLYNQLLGGISREAGTEKIKGLNEVLNLAIQKNDETAHIIASLPHRFIPLFKQILSDRNTLSFILEEFKSDEEVIQSFCKYKTLLRNENVLETAEALFNELNSIDLTHIFISHKKLETISSALCDHWDTLRNALYERRISELTGKITKSAKEKVQRSLKHEDINLQEIISAAGKELSEAFKQKTSEILSHAHAALDQPLPTTLKKQEEKEILKSQLDSLLGLYHLLDWFAVDESNEVDPEFSARLTGIKLEMEPSLSFYNKARNYATKKPYSVEKFKLNFQRPTLASGWDVNKEKNNGAILFVKNGLYYLGIMPKQKGRYKALSFEPTEKTSEGFDKMYYDYFPDAAKMIPKCSTQLKAVTAHFQTHTTPILLSNNFIEPLEITKEIYDLNNPEKEPKKFQTAYAKKTGDQKGYREALCKWIDFTRDFLSKYTKTTSIDLSSLRPSSQYKDLGEYYAELNPLLYHISFQRIAEKEIMDAVETGKLYLFQIYNKDFAKGHHGKPNLHTLYWTGLFSPENLAKTSIKLNGQAELFYRPKSRMKRMAARLGEKMLNKKLKDQKTPIPDTLYQELYDYVNHRLSHDLSDEARALLPNVITKEVSHEIIKDRRFTSDKFLFHVPITLNYQAANSPSKFNQRVNAYLKEHPETPIIGIDRGERNLIYITVIDSTGKILEQRSLNTIQQFDYQKKLDNREKERVAARQAWSVVGTIKDLKQGYLSQVIHEIVDLMIHYQAVVVLENLNFGFKSKRTGIAEKAVYQQFEKMLIDKLNCLVLKDYPAEKVGGVLNPYQLTDQFTSFAKMGTQSGFLFYVPAPYTSKIDPLTGFVDPFVWKTIKNHESRKHFLEGFDFLHYDVKTGDFILHFKMNRNLSFQRGLPGFMPAWDIVFEKNETQFDAKGTPFIAGKRIVPVIENHRFTGRYRDLYPANELIALLEEKGIVFRDGSNILPKLLENDDSHAIDTMVALIRSVLQMRNSNAATGEDYINSPVRDLNGVCFDSRFQNPEWPMDADANGAYHIALKGQLLLNHLKESKDLKLQNGISNQDWLAYIQELRNGRSSDDEATADSQHAAPPKKKRKVGGSGGSGGSGGSGGSGGSGGSGGSLEHHHHHH

SEQ ID NO: 1097 - protein, 1331 aa, synthetic construct
  REGION 1..1331: note = Cpf1
  REGION 1310..1331: note = MISC_FEATURE - NLS
MTQFEGFTNLYQVSKTLRFELIPQGKTLKHIQEQGFIEEDKARNDHYKELKPIIDRIYKTYADQCLQLVQLDWENLSAAIDSYRKEKTEETRNALIEEQATYRNAIHDYFIGRTDNLTDAINKRHAEIYKGLFKAELFNGKVLKQLGTVTTTEHENALLRSFDKFTTYFSGFYENRKNVFSAEDISTAIPHRIVQDNFPKFKENCHIFTRLITAVPSLREHFENVKKAIGIFVSTSIEEVFSFPFYNQLLTQTQIDLYNQLLGGISREAGTEKIKGLNEVLNLAIQKNDETAHIIASLPHRFIPLFKQILSDRNTLSFILEEFKSDEEVIQSFCKYKTLLRNENVLETAEALFNELNSIDLTHIFISHKKLETISSALCDHWDTLRNALYERRISELTGKITKSAKEKVQRSLKHEDINLQEIISAAGKELSEAFKQKTSEILSHAHAALDQPLPTTLKKQEEKEILKSQLDSLLGLYHLLDWFAVDESNEVDPEFSARLTGIKLEMEPSLSFYNKARNYATKKPYSVEKFKLNFQRPTLASGWDVNKEKNNGAILFVKNGLYYLGIMPKQKGRYKALSFEPTEKTSEGFDKMYYDYFPDAAKMIPKCSTQLKAVTAHFQTHTTPILLSNNFIEPLEITKEIYDLNNPEKEPKKFQTAYAKKTGDQKGYREALCKWIDFTRDFLSKYTKTTSIDLSSLRPSSQYKDLGEYYAELNPLLYHISFQRIAEKEIMDAVETGKLYLFQIYNKDFAKGHHGKPNLHTLYWTGLFSPENLAKTSIKLNGQAELFYRPKSRMKRMAARLGEKMLNKKLKDQKTPIPDTLYQELYDYVNHRLSHDLSDEARALLPNVITKEVSHEIIKDRRFTSDKFLFHVPITLNYQAANSPSKFNQRVNAYLKEHPETPIIGIDRGERNLIYITVIDSTGKILEQRSLNTIQQFDYQKKLDNREKERVAARQAWSVVGTIKDLKQGYLSQVIHEIVDLMIHYQAVVVLENLNFGFKSKRTGIAEKAVYQQFEKMLIDKLNCLVLKDYPAEKVGGVLNPYQLTDQFTSFAKMGTQSGFLFYVPAPYTSKIDPLTGFVDPFVWKTIKNHESRKHFLEGFDFLHYDVKTGDFILHFKMNRNLSFQRGLPGFMPAWDIVFEKNETQFDAKGTPFIAGKRIVPVIENHRFTGRYRDLYPANELIALLEEKGIVFRDGSNILPKLLENDDSHAIDTMVALIRSVLQMRNSNAATGEDYINSPVRDLNGVCFDSRFQNPEWPMDADANGAYHIALKGQLLLNHLKESKDLKLQNGISNQDWLAYIQELRNGRSSDDEATADSQHAAPPKKKRKV

SEQ ID NO: 1098 - DNA, 67 bp, synthetic construct
  misc_feature 1..67: note = gRNA
  misc_feature 1..25: note = DNA nucleotides
  misc_feature 1..2: note = Linked by phosphorothioate (PS) bond
  misc_feature 2..3: note = Linked by phosphorothioate (PS) bond
  misc_feature 26..67: note = RNA nucleotides
  misc_feature 66..67: note = Linked by phosphorothioate (PS) bond
  misc_feature 66: note = Modified to contain 2'-O-methyl
  source 1..67: mol_type = other DNA
atgtgtttttgtcaaaagacctttttaatttctactcttgtagatccttgtcaaggctattggtcat

SEQ ID NO: 1099 - DNA, 68 bp, synthetic construct
  misc_feature 1..68: note = gRNA
  misc_feature 1..25: note = DNA nucleotides
  misc_feature 1..2: note = Linked by phosphorothioate (PS) bond
  misc_feature 2..3: note = Linked by phosphorothioate (PS) bond
  misc_feature 26..68: note = RNA nucleotides
  misc_feature 66..67: note = Linked by phosphorothioate (PS) bond
  misc_feature 66: note = Modified to contain 2'-O-methyl
  misc_feature 67: note = Modified to contain 2'-O-methyl
  misc_feature 67..68: note = Linked by phosphorothioate (PS) bond
  source 1..68: mol_type = other DNA
atgtgtttttgtcaaaagacctttttaatttctactcttgtagatccttgtcaaggctattggtcaat

SEQ ID NO: 1100 - DNA, 66 bp, synthetic construct; identical to SEQ ID NO: 1074
  misc_feature 1..66: note = gRNA
  misc_feature 1..25: note = DNA nucleotides
  misc_feature 1..2: note = Linked by phosphorothioate (PS) bond
  misc_feature 2..3: note = Linked by phosphorothioate (PS) bond
  misc_feature 26..66: note = RNA nucleotides
  misc_feature 65: note = Modified to contain 2'-O-methyl
  misc_feature 65..66: note = Linked by phosphorothioate (PS) bond
  source 1..66: mol_type = other DNA

SEQ ID NO: 1101 - DNA, 65 bp, synthetic construct; identical to SEQ ID NO: 1048
  misc_feature 1..65: note = gRNA
  misc_feature 1..25: note = DNA nucleotides
  misc_feature 1..2: note = Linked by phosphorothioate (PS) bond
  misc_feature 2..3: note = Linked by phosphorothioate (PS) bond
  misc_feature 26..65: note = RNA nucleotides
  misc_feature 64..65: note = Linked by phosphorothioate (PS) bond
  misc_feature 65: note = Modified to contain 2'-O-methyl
  source 1..65: mol_type = other DNA

SEQ ID NO: 1102 - DNA, 67 bp, synthetic construct
  misc_feature 1..67: note = gRNA
  misc_feature 1..25: note = DNA nucleotides
  misc_feature 1..2: note = Linked by phosphorothioate (PS) bond
  misc_feature 2..3: note = Linked by phosphorothioate (PS) bond
  misc_feature 26..67: note = RNA nucleotides
  misc_feature 65..66: note = Linked by phosphorothioate (PS) bond
  misc_feature 66..67: note = Linked by phosphorothioate (PS) bond
  misc_feature 66: note = Modified to contain 2'-O-methyl
  misc_feature 67: note = Modified to contain 2'-O-methyl
  source 1..67: mol_type = other DNA
atgtgtttttgtcaaaagacctttttaatttctactcttgtagatccttgtcaaggctattggtcaa

SEQ ID NO: 1103 - RNA, 66 nt, synthetic construct
  misc_feature 1..66: note = gRNA
  misc_feature 1..2: note = Linked by phosphorothioate (PS) bond
  misc_feature 1: note = Modified to contain 2'-O-methyl
  misc_feature 2: note = Modified to contain 2'-O-methyl
  misc_feature 2..3: note = Linked by phosphorothioate (PS) bond
  misc_feature 65..66: note = Linked by phosphorothioate (PS) bond
  misc_feature 66: note = Modified to contain 2'-O-methyl
  source 1..66: mol_type = other RNA
atgtgtttttgtcaaaagacctttttaatttctactcttgtagatccttgtcaaggctattggtca

SEQ ID NO: 1104 - RNA, 66 nt, synthetic construct
  misc_feature 1..66: note = gRNA
  misc_feature 1..2: note = Linked by phosphorothioate (PS) bond
  misc_feature 1: note = Modified to contain 2'-O-methyl
  misc_feature 2: note = Modified to contain 2'-O-methyl
  misc_feature 2..3: note = Linked by phosphorothioate (PS) bond
  misc_feature 65..66: note = Linked by phosphorothioate (PS) bond
  misc_feature 66: note = Modified to contain 2'-O-methyl
  source 1..66: mol_type = other RNA
aaaaaaaaaaaaaaaaaaaaaaaaataatttctactcttgtagatccttgtcaaggctattggtca

SEQ ID NO: 1105 - RNA, 66 nt, synthetic construct
  misc_feature 1..66: note = gRNA
  misc_feature 1..2: note = Linked by phosphorothioate (PS) bond
  misc_feature 1: note = Modified to contain 2'-O-methyl
  misc_feature 2: note = Modified to contain 2'-O-methyl
  misc_feature 2..3: note = Linked by phosphorothioate (PS) bond
  misc_feature 65..66: note = Linked by phosphorothioate (PS) bond
  misc_feature 66: note = Modified to contain 2'-O-methyl
  source 1..66: mol_type = other RNA
ttttttttttttttttttttttttttaatttctactcttgtagatccttgtcaaggctattggtca

SEQ ID NO: 1106 - DNA, 42 bp, synthetic construct
  misc_feature 1..42: note = gRNA
  misc_feature 1..2: note = Linked by phosphorothioate (PS) bond
  misc_feature 2..3: note = Linked by phosphorothioate (PS) bond
  source 1..42: mol_type = other DNA
taatttctactcttgtagatccttgtcaggctattggtcaag

SEQ ID NO: 1107 - protein, 1331 aa, synthetic construct
  REGION 1..1331: note = Cpf1
  REGION 1310..1331: note = MISC_FEATURE - NLS
STQFEGFTNLYQVSKTLRFELIPQGKTLKHIQEQGFIEEDKARNDHYKELKPIIDRIYKTYADQCLQLVQLDWENLSAAIDSYRKEKTEETRNALIEEQATYRNAIHDYFIGRTDNLTDAINKRHAEIYKGLFKAELFNGKVLKQLGTVTTTEHENALLRSFDKFTTYFSGFYENRKNVFSAEDISTAIPHRIVQDNFPKFKENCHIFTRLITAVPSLREHFENVKKAIGIFVSTSIEEVFSFPFYNQLLTQTQIDLYNQLLGGISREAGTEKIKGLNEVLNLAIQKNDETAHIIASLPHRFIPLFKQILSDRNTLSFILEEFKSDEEVIQSFCKYKTLLRNENVLETAEALFNELNSIDLTHIFISHKKLETISSALCDHWDTLRNALYERRISELTGKITKSAKEKVQRSLKHEDINLQEIISAAGKELSEAFKQKTSEILSHAHAALDQPLPTTLKKQEEKEILKSQLDSLLGLYHLLDWFAVDESNEVDPEFSARLTGIKLEMEPSLSFYNKARNYATKKPYSVEKFKLNFQRPTLASGWDVNKEKNNGAILFVKNGLYYLGIMPKQKGRYKALSFEPTEKTSEGFDKMYYDYFPDAAKMIPKCSTQLKAVTAHFQTHTTPILLSNNFIEPLEITKEIYDLNNPEKEPKKFQTAYAKKTGDQKGYREALCKWIDFTRDFLSKYTKTTSIDLSSLRPSSQYKDLGEYYAELNPLLYHISFQRIAEKEIMDAVETGKLYLFQIYNKDFAKGHHGKPNLHTLYWTGLFSPENLAKTSIKLNGQAELFYRPKSRMKRMAHRLGEKMLNKKLKDQKTPIPDTLYQELYDYVNHRLSHDLSDEARALLPNVITKEVSHEIIKDRRFTSDKFLFHVPITLNYQAANSPSKFNQRVNAYLKEHPETPIIGIDRGERNLIYITVIDSTGKILEQRSLNTIQQFDYQKKLDNREKERVAARQAWSVVGTIKDLKQGYLSQVIHEIVDLMIHYQAVVVLENLNFGFKSKRTGIAEKAVYQQFEKMLIDKLNCLVLKDYPAEKVGGVLNPYQLTDQFTSFAKMGTQSGFLFYVPAPYTSKIDPLTGFVDPFVWKTIKNHESRKHFLEGFDFLHYDVKTGDFILHFKMNRNLSFQRGLPGFMPAWDIVFEKNETQFDAKGTPFIAGKRIVPVIENHRFTGRYRDLYPANELIALLEEKGIVFRDGSNILPKLLENDDSHAIDTMVALIRSVLQMRNSNAATGEDYINSPVRDLNGVCFDSRFQNPEWPMDADANGAYHIALKGQLLLNHLKESKDLKLQNGISNQDWLAYIQELRNGRSSDDEATADSQHAAPPKKKRKV

SEQ ID NO: 1108 - protein, 1363 aa, synthetic construct
  REGION 1..1363: note = Cpf1
  REGION 1310..1331: note = MISC_FEATURE - NLS
  REGION 1358..1363: note = MISC_FEATURE - His tag
STQFEGFTNLYQVSKTLRFELIPQGKTLKHIQEQGFIEEDKARNDHYKELKPIIDRIYKTYADQCLQLVQLDWENLSAAIDSYRKEKTEETRNALIEEQATYRNAIHDYFIGRTDNLTDAINKRHAEIYKGLFKAELFNGKVLKQLGTVTTTEHENALLRSFDKFTTYFSGFYENRKNVFSAEDISTAIPHRIVQDNFPKFKENCHIFTRLITAVPSLREHFENVKKAIGIFVSTSIEEVFSFPFYNQLLTQTQIDLYNQLLGGISREAGTEKIKGLNEVLNLAIQKNDETAHIIASLPHRFIPLFKQILSDRNTLSFILEEFKSDEEVIQSFCKYKTLLRNENVLETAEALFNELNSIDLTHIFISHKKLETISSALCDHWDTLRNALYERRISELTGKITKSAKEKVQRSLKHEDINLQEIISAAGKELSEAFKQKTSEILSHAHAALDQPLPTTLKKQEEKEILKSQLDSLLGLYHLLDWFAVDESNEVDPEFSARLTGIKLEMEPSLSFYNKARNYATKKPYSVEKFKLNFQRPTLASGWDVNKEKNNGAILFVKNGLYYLGIMPKQKGRYKALSFEPTEKTSEGFDKMYYDYFPDAAKMIPKCSTQLKAVTAHFQTHTTPILLSNNFIEPLEITKEIYDLNNPEKEPKKFQTAYAKKTGDQKGYREALCKWIDFTRDFLSKYTKTTSIDLSSLRPSSQYKDLGEYYAELNPLLYHISFQRIAEKEIMDAVETGKLYLFQIYNKDFAKGHHGKPNLHTLYWTGLFSPENLAKTSIKLNGQAELFYRPKSRMKRMAHRLGEKMLNKKLKDQKTPIPDTLYQELYDYVNHRLSHDLSDEARALLPNVITKEVSHEIIKDRRFTSDKFLFHVPITLNYQAANSPSKFNQRVNAYLKEHPETPIIGIDRGERNLIYITVIDSTGKILEQRSLNTIQQFDYQKKLDNREKERVAARQAWSVVGTIKDLKQGYLSQVIHEIVDLMIHYQAVVVLENLNFGFKSKRTGIAEKAVYQQFEKMLIDKLNCLVLKDYPAEKVGGVLNPYQLTDQFTSFAKMGTQSGFLFYVPAPYTSKIDPLTGFVDPFVWKTIKNHESRKHFLEGFDFLHYDVKTGDFILHFKMNRNLSFQRGLPGFMPAWDIVFEKNETQFDAKGTPFIAGKRIVPVIENHRFTGRYRDLYPANELIALLEEKGIVFRDGSNILPKLLENDDSHAIDTMVALIRSVLQMRNSNAATGEDYINSPVRDLNGVCFDSRFQNPEWPMDADANGAYHIALKGQLLLNHLKESKDLKLQNGISNQDWLAYIQELRNGRSSDDEATADSQHAAPPKKKRKVGGSGGSGGSGGSGGSGGSGGSGGSLEHHHHHH

SEQ ID NO: 1109 - protein, 1361 aa, synthetic construct
  REGION 1..1361: note = Cpf1
  REGION 1342..1348: note = MISC_FEATURE - NLS
  REGION 1356..1361: note = MISC_FEATURE - His tag
MGRDPGKPIPNPLLGLDSTAPKKKRKVGIHGVPAATQFEGFTNLYQVSKTLRFELIPQGKTLKHIQEQGFIEEDKARNDHYKELKPIIDRIYKTYADQCLQLVQLDWENLSAAIDSYRKEKTEETRNALIEEQATYRNAIHDYFIGRTDNLTDAINKRHAEIYKGLFKAELFNGKVLKQLGTVTTTEHENALLRSFDKFTTYFSGFYENRKNVFSAEDISTAIPHRIVQDNFPKFKENCHIFTRLITAVPSLREHFENVKKAIGIFVSTSIEEVFSFPFYNQLLTQTQIDLYNQLLGGISREAGTEKIKGLNEVLNLAIQKNDETAHIIASLPHRFIPLFKQILSDRNTLSFILEEFKSDEEVIQSFCKYKTLLRNENVLETAEALFNELNSIDLTHIFISHKKLETISSALCDHWDTLRNALYERRISELTGKITKSAKEKVQRSLKHEDINLQEIISAAGKELSEAFKQKTSEILSHAHAALDQPLPTTLKKQEEKEILKSQLDSLLGLYHLLDWFAVDESNEVDPEFSARLTGIKLEMEPSLSFYNKARNYATKKPYSVEKFKLNFQMPTLASGWDVNKEKNNGAILFVKNGLYYLGIMPKQKGRYKALSFEPTEKTSEGFDKMYYDYFPDAAKMIPKCSTQLKAVTAHFQTHTTPILLSNNFIEPLEITKEIYDLNNPEKEPKKFQTAYAKKTGDQKGYREALCKWIDFTRDFLSKYTKTTSIDLSSLRPSSQYKDLGEYYAELNPLLYHISFQRIAEKEIMDAVETGKLYLFQIYNKDFAKGHHGKPNLHTLYWTGLFSPENLAKTSIKLNGQAELFYRPKSRMKRMAHRLGEKMLNKKLKDQKTPIPDTLYQELYDYVNHRLSHDLSDEARALLPNVITKEVSHEIIKDRRFTSDKFFFHVPITLNYQAANSPSKFNQRVNAYLKEHPETPIIGIDRGERNLIYITVIDSTGKILEQRSLNTIQQFDYQKKLDNREKERVAARQAWSVVGTIKDLKQGYLSQVIHEIVDLMIHYQAVVVLENLNFGFKSKRTGIAEKAVYQQFEKMLIDKLNCLVLKDYPAEKVGGVLNPYQLTDQFTSFAKMGTQSGFLFYVPAPYTSKIDPLTGFVDPFVWKTIKNHESRKHFLEGFDFLHYDVKTGDFILHFKMNRNLSFQRGLPGFMPAWDIVFEKNETQFDAKGTPFIAGKRIVPVIENHRFTGRYRDLYPANELIALLEEKGIVFRDGSNILPKLLENDDSHAIDTMVALIRSVLQMRNSNAATGEDYINSPVRDLNGVCFDSRFQNPEWPMDADANGAYHIALKGQLLLNHLKESKDLKLQNGISNQDWLAYIQELRNPKKKRKVKLAAALEHHHHHH

SEQ ID NO: 1110 - DNA, 4002 bp, synthetic construct
  misc_feature 1..4002: note = His-AsCpf1-sNLS-sNLS H800A
  misc_feature 7..24: note = His tag
  misc_feature 3955..3975: note = sNLS
  misc_feature 3982..4002: note = sNLS
  source 1..4002: mol_type = other DNA
atgggccatcatcatcaccatcacggtagcacccagtttgaaggctttaccaatctgtatcaggttagcaaaaccctgcgttttgaactgattccgcagggtaaaaccctgaaacatattcaagaacagggcttcatcgaagaggataaagcacgtaacgatcactacaaagaactgaaaccgattatcgaccgcatctataaaacgtacgcagatcagtgtctgcagctggttcagctggattgggaaaatctgagcgcagcaattgatagttatcgcaaagagaaaaccgaagaaacccgtaatgcactgattgaagaacaggcaacctatcgtaatgccatccatgattatttcattggtcgtaccgataatctgaccgatgcaattaacaaacgtcacgccgaaatctataaaggcctgtttaaagccgaactgtttaatggcaaagttctgaaacagctgggcaccgttaccaccaccgaacatgaaaatgcactgctgcgtagctttgataaattcaccacctatttcagcggcttttatgagaatcgcaaaaacgtgtttagcgcagaagatattagcaccgcaattccgcatcgtattgtgcaggataatttcccgaaattcaaagagaactgccacatttttacccgtctgattaccgcagttccgagcctgcgtgaacattttgaaaacgttaaaaaagccatcggcatctttgttagcaccagcattgaagaagtttttagcttcccgttttacaatcagctgctgacccagacacagattgatctgtataaccagctgttaggtggtattagccgtgaagcaggcaccgaaaaaatcaaaggtctgaatgaagtgctgaatctggccattcagaaaaatgatgaaaccgcacatattattgcaagcctgccgcatcgttttattccgctgtttaagcagattctgagcgatcgtaataccctgagctttattctggaagaattcaaatccgatgaagaggtgattcagagcttctgcaaatacaaaacgctgctgcgcaatgaaaatgttctggaaactgccgaagcactgtttaacgaactgaatagcattgatctgacccacatctttatcagccacaaaaaactggaaaccatttcaagcgcactgtgtgatcattgggataccctgcgtaatgccctgtatgaacgtcgtattagcgaactgaccggtaaaattaccaaaagcgcgaaagaaaaagttcagcgcagtctgaaacatgaggatattaatctgcaagagattattagcgcagccggtaaagaactgtcagaagcatttaaacagaaaaccagcgaaattctgagccatgcacatgcagcactggatcagccgctgccgaccacactgaaaaaacaagaagaaaaagagatcctgaaaagccagctggatagcctgctgggtctgtatcatctgctggactggtttgcagttgatgaaagcaatgaagttgatccggaatttagcgcacgtctgaccggcattaagctggaaatggaaccgagcctgagtttttacaataaagcccgtaattatgccaccaaaaaaccgtatagcgtggaaaaattcaagctgaacttccagatgccgacactggcaagcggttgggatgttaataaagaaaagaacaatggtgccatcctgttcgtgaaaaatggcctgtattatctgggtatcatgccgaaacagaaaggtcgttataaagcactgagctttgaaccgacagaaaaaaccagtgaaggcttcgataaaatgtactatgattactttccggacgcagccaaaatgattccgaaatgcagcacccagctgaaagcagttaccgcacattttcagacccataccacaccgattctgctgagcaataactttattgaaccgctggaaatcaccaaagagatctacgatctgaataacccggaaaaagagccgaaaaagtttcagaccgcctatgcaaaaaaaaccggtgatcagaaaggttatcgtgaagcgctgtgtaaatggattgatttcacccgtgattttctgagcaaatacaccaaaaccaccagtatcgatctgagcagcctgcgtccgagcagccagtataaagatctgggcgaatattatgcagaactgaatccgctgctgtatcatattagctttcagcgtattgccgagaaagaaataatggatgcagttgaaaccggtaagctgtacctgttccagatttataacaaagactttgccaaaggccatcatggtaaaccgaatctgcataccctgtattggaccggtctgtttagccctgaaaatctggcaaaaaccagcattaaactgaatggtcaggcggaactgttttatcgtccgaaaagccgtatgaaacgtatggcagcacgtctgggtgaaaaaatgctgaataaaaagctgaaggatcagaaaaccccgattccggatacactgtatcaagagctgtatgattatgtgaatcatcgtctgagtcatgatctgagtgatgaagcacgtgccctgctgccgaatgttattaccaaagaagttagccacgagatcattaaagatcgtcgttttaccagcgacaagttttttttccatgttccgattacgctgaattatcaggcagcaaatagcccgagcaaatttaaccagcgtgtgaatgcatatctgaaagaacatccggaaacaccgattattggtattgatcgtggtgaacgcaacctgatttatatcaccgttattgatagcaccggcaagatcctggaacagcgtagcctgaataccattcagcagtttgattatcagaaaaagctggacaaccgtgaaaaagaacgtgttgcagcccgtcaggcatggtcagttgttggtacaattaaagacctgaaacagggttatctgagccaggttattcatgaaattgtggatctgatgattcattaccaggcagttgttgtgctggaaaacctgaattttggctttaaaagcaaacgtaccggcattgcggaaaaagcagtttatcagcagttcgaaaagatgctgatcgataaactgaactgtctggtgctgaaagattatccggctgaaaaagttggcggtgttctgaatccgtatcagctgaccgatcagtttaccagctttgcaaaaatgggcacccagagcggatttctgttttatgttccggcaccgtatacgagcaaaattgatccgctgaccggttttgttgatccgtttgtttggaaaaccatcaaaaaccatgaaagccgcaaacattttctggaaggttttgatttcctgcattacgacgttaagaccggtgattttattctgcactttaagatgaatcggaacctgtcatttcagcgtggtctgcctggttttatgcctgcatgggatattgtgtttgagaaaaacgaaacacagttcgatgcaaaaggcaccccgtttattgcaggtaaacgtattgttccggtgattgaaaatcatcgtttcaccggtcgttatcgcgatctgtatccggcaaatgaactgatcgcactgctggaagagaaaggtattgtttttcgtgatggctcaaacattctgccgaaactgttagagaatgatgatagccatgccattgataccatggttgccctgattcgtagcgttctgcagatgcgtaatagcaatgcagcaaccggtgaagattacattaatagtccggttcgtgatctgaatggtgtttgttttgatagccgttttcagaatccggaatggccgatggatgcggatgcaaatggtgcatatcatattgcactgaaaggacagctgctgctgaaccacctgaaagaaagtaaagatttgaagctgcagaatggcattagcaatcaggattggctggcatatatccaagaactgcgtaacggttctcctaagaaaaagcgcaaagttggcagtccgaagaagaaacgtaaggtt

SEQ ID NO: 1111 - DNA, 4089 bp, synthetic construct
  misc_feature 1..4089: note = Cpf1
  misc_feature 3928..3993: note = NLS
  misc_feature 4072..4089: note = His tag
  source 1..4089: mol_type = other DNA
atgacccagtttgaaggtttcaccaatctgtatcaggttagcaaaaccctgcgttttgaactgattccgcagggtaaaaccctgaaacatattcaagaacagggcttcatcgaagaggataaagcacgtaacgatcactacaaagaactgaaaccgattatcgaccgcatctataaaacctatgcagatcagtgtctgcagctggttcagctggattgggaaaatctgagcgcagcaattgatagttatcgcaaagaaaaaaccgaagaaacccgtaatgcactgattgaagaacaggcaacctatcgtaatgccatccatgattatttcattggtcgtaccgataatctgaccgatgcaattaacaaacgtcacgccgaaatctataaaggcctgtttaaagccgaactgtttaatggcaaagttctgaaacagctgggcaccgttaccaccaccgaacatgaaaatgcactgctgcgtagctttgataaattcaccacctatttcagcggcttttatgagaatcgcaaaaacgtgtttagcgcagaagatattagcaccgcaattccgcatcgtattgtgcaggataatttcccgaaattcaaagagaactgccacatttttacccgtctgattaccgcagttccgagcctgcgtgaacattttgaaaacgttaaaaaagccatcggcatctttgttagcaccagcattgaagaagtttttagcttcccgttttacaatcagctgctgacccagacccagattgatctgtataaccaactgctgggtggtattagccgtgaagcaggcaccgaaaaaatcaaaggtctgaatgaagtgctgaatctggccattcagaaaaatgatgaaaccgcacatattattgcaagcctgccgcatcgttttattccgctgttcaaacaaattctgagcgatcgtaataccctgagctttattctggaagaattcaaatccgatgaagaggtgattcagagcttttgcaaatacaaaacgctgctgcgcaatgaaaatgttctggaaactgccgaagcactgtttaacgaactgaatagcattgatctgacccacatctttatcagccacaaaaaactggaaaccatttcaagcgcactgtgtgatcattgggataccctgcgtaatgccctgtatgaacgtcgtattagcgaactgaccggtaaaattaccaaaagcgcgaaagaaaaagttcagcgcagtctgaaacatgaggatattaatctgcaagagattattagcgcagccggtaaagaactgtcagaagcatttaaacagaaaaccagcgaaattctgtcacatgcacatgcagcactggatcagccgctgccgaccaccctgaaaaaacaagaagaaaaagaaatcctgaaaagccagctggatagcctgctgggtctgtatcatctgctggactggtttgcagttgatgaaagcaatgaagttgatccggaatttagcgcacgtctgaccggcattaaactggaaatggaaccgagcctgagcttttataacaaagcccgtaattatgccaccaaaaaaccgtatagcgtcgaaaaattcaaactgaactttcagcgtccgaccctggcaagcggttgggatgttaataaagaaaaaaacaacggtgccatcctgttcgtgaaaaatggcctgtattatctgggtattatgccgaaacagaaaggtcgttataaagcgctgagctttgaaccgacggaaaaaaccagtgaaggttttgataaaatgtactacgactattttccggatgcagccaaaatgattccgaaatgtagcacccagctgaaagcagttaccgcacattttcagacccataccaccccgattctgctgagcaataactttattgaaccgctggaaatcaccaaagagatctacgatctgaataacccggaaaaagagccgaaaaaattccagaccgcatatgcaaaaaaaaccggtgatcagaaaggttatcgtgaagcgctgtgtaaatggattgatttcacccgtgattttctgagcaaatacaccaaaaccaccagtatcgatctgagcagcctgcgtccgagcagccagtataaagatctgggcgaatattatgcagaactgaatccgctgctgtatcatattagctttcagcgtattgccgagaaagaaatcatggacgcagttgaaaccggtaaactgtacctgttccagatctacaataaagattttgccaaaggccatcatggcaaaccgaatctgcataccctgtattggaccggtctgtttagccctgaaaatctggcaaaaacctcgattaaactgaatggtcaggcggaactgttttatcgtccgaaaagccgtatgaaacgtatggcacatcgtctgggtgaaaaaatgctgaacaaaaaactgaaagaccagaaaaccccgatcccggatacactgtatcaagaactgtatgattatgtgaaccatcgtctgagccatgatctgagtgatgaagcacgtgccctgctgccgaatgttattaccaaagaagttagccacgagatcattaaagatcgtcgttttaccagcgacaaattcctgtttcatgtgccgattaccctgaattatcaggcagcaaatagcccgagcaaatttaaccagcgtgttaatgcatatctgaaagaacatccagaaacgccgattattggtattgatcgtggtgaacgtaacctgatttatatcaccgttattgatagcaccggcaaaatcctggaacagcgtagcctgaataccattcagcagtttgattaccagaaaaaactggataatcgcgagaaagaacgtgttgcagcacgtcaggcatggtcagttgttggtacaattaaagacctgaaacagggttatctgagccaggttattcatgaaattgtggatctgatgattcactatcaggccgttgttgtgctggaaaacctgaattttggctttaaaagcaaacgtaccggcattgcagaaaaagcagtttatcagcagttcgagaaaatgctgattgacaaactgaattgcctggtgctgaaagattatccggctgaaaaagttggtggtgttctgaatccgtatcagctgaccgatcagtttaccagctttgcaaaaatgggcacccagagcggatttctgttttatgttccggcaccgtatacgagcaaaattgatccgctgaccggttttgttgatccgtttgtttggaaaaccatcaaaaaccatgaaagccgcaaacattttctggaaggtttcgattttctgcattacgacgttaaaacgggtgatttcatcctgcactttaaaatgaatcgcaatctgagttttcagcgtggcctgcctggttttatgcctgcatgggatattgtgtttgagaaaaacgaaacacagttcgatgcaaaaggcaccccgtttattgcaggtaaacgtattgttccggtgattgaaaatcatcgtttcaccggtcgttatcgcgatctgtatccggcaaatgaactgatcgcactgctggaagagaaaggtattgtttttcgtgatggctcaaacattctgccgaaactgctggaaaatgatgatagccatgcaattgataccatggttgcactgattcgtagcgttctgcagatgcgtaatagcaatgcagcaaccggtgaagattacattaatagtccggttcgtgatctgaatggtgtttgttttgatagccgttttcagaatccggaatggccgatggatgcagatgcaaatggtgcatatcatattgcactgaaaggacagctgctgctgaaccacctgaaagaaagcaaagatctgaaactgcaaaacggcattagcaatcaggattggctggcatatatccaagaactgcgtaacggtcgtagcagtgatgatgaagcaaccgcagatagccagcatgcagcaccgcctaaaaagaaacgtaaagttggtggtagcggtggttcaggtggtagtggcggtagtggtggctcagggggttctggtggctctggtggtagcctcgagcaccaccaccaccaccac

SEQ ID NO: 1112 - DNA, 4089 bp, synthetic construct
  misc_feature 1..4089: note = Cpf1
  misc_feature 3928..3993: note = NLS
  misc_feature 4072..4089: note = His tag
  source 1..4089: mol_type = other DNA
atgacccagtttgaaggtttcaccaatctgtatcaggttagcaaaaccctgcgttttgaactgattccgcagggtaaaaccctgaaacatattcaagaacagggcttcatcgaagaggataaagcacgtaacgatcactacaaagaactgaaaccgattatcgaccgcatctataaaacctatgcagatcagtgtctgcagctggttcagctggattgggaaaatctgagcgcagcaattgatagttatcgcaaagaaaaaaccgaagaaacccgtaatgcactgattgaagaacaggcaacctatcgtaatgccatccatgattatttcattggtcgtaccgataatctgaccgatgcaattaacaaacgtcacgccgaaatctataaaggcctgtttaaagccgaactgtttaatggcaaagttctgaaacagctgggcaccgttaccaccaccgaacatgaaaatgcactgctgcgtagctttgataaattcaccacctatttcagcggcttttatgagaatcgcaaaaacgtgtttagcgcagaagatattagcaccgcaattccgcatcgtattgtgcaggataatttcccgaaattcaaagagaactgccacatttttacccgtctgattaccgcagttccgagcctgcgtgaacattttgaaaacgttaaaaaagccatcggcatctttgttagcaccagcattgaagaagtttttagcttcccgttttacaatcagctgctgacccagacccagattgatctgtataaccaactgctgggtggtattagccgtgaagcaggcaccgaaaaaatcaaaggtctgaatgaagtgctgaatctggccattcagaaaaatgatgaaaccgcacatattattgcaagcctgccgcatcgttttattccgctgttcaaacaaattctgagcgatcgtaataccctgagctttattctggaagaattcaaatccgatgaagaggtgattcagagcttttgcaaatacaaaacgctgctgcgcaatgaaaatgttctggaaactgccgaagcactgtttaacgaactgaatagcattgatctgacccacatctttatcagccacaaaaaactggaaaccatttcaagcgcactgtgtgatcattgggataccctgcgtaatgccctgtatgaacgtcgtattagcgaactgaccggtaaaattaccaaaagcgcgaaagaaaaagttcagcgcagtctgaaacatgaggatattaatctgcaagagattattagcgcagccggtaaagaactgtcagaagcatttaaacagaaaaccagcgaaattctgtcacatgcacatgcagcactggatcagccgctgccgaccaccctgaaaaaacaagaagaaaaagaaatcctgaaaagccagctggatagcctgctgggtctgtatcatctgctggactggtttgcagttgatgaaagcaatgaagttgatccggaatttagcgcacgtctgaccggcattaaactggaaatggaaccgagcctgagcttttataacaaagcccgtaattatgccaccaaaaaaccgtatagcgtcgaaaaattcaaactgaactttcagatgccgaccctggcaagcggttgggatgttaataaagaaaaaaacaacggtgccatcctgttcgtgaaaaatggcctgtattatctgggtattatgccgaaacagaaaggtcgttataaagcgctgagctttgaaccgacggaaaaaaccagtgaaggttttgataaaatgtactacgactattttccggatgcagccaaaatgattccgaaatgtagcacccagctgaaagcagttaccgcacattttcagacccataccaccccgattctgctgagcaataactttattgaaccgctggaaatcaccaaagagatctacgatctgaataacccggaaaaagagccgaaaaaattccagaccgcatatgcaaaaaaaaccggtgatcagaaaggttatcgtgaagcgctgtgtaaatggattgatttcacccgtgattttctgagcaaatacaccaaaaccaccagtatcgatctgagcagcctgcgtccgagcagccagtataaagatctgggcgaatattatgcagaactgaatccgctgctgtatcatattagctttcagcgtattgccgagaaagaaatcatggacgcagttgaaaccggtaaactgtacctgttccagatctacaataaagattttgccaaaggccatcatggcaaaccgaatctgcataccctgtattggaccggtctgtttagccctgaaaatctggcaaaaacctcgattaaactgaatggtcaggcggaactgttttatcgtccgaaaagccgtatgaaacgtatggcacatcgtctgggtgaaaaaatgctgaacaaaaaactgaaagaccagaaaaccccgatcccggatacactgtatcaagaactgtatgattatgtgaaccatcgtctgagccatgatctgagtgatgaagcacgtgccctgctgccgaatgttattaccaaagaagttagccacgagatcattaaagatcgtcgttttaccagcgacaaattcttttttcatgtgccgattaccctgaattatcaggcagcaaatagcccgagcaaatttaaccagcgtgttaatgcatatctgaaagaacatccagaaacgccgattattggtattgatcgtggtgaacgtaacctgatttatatcaccgttattgatagcaccggcaaaatcctggaacagcgtagcctgaataccattcagcagtttgattaccagaaaaaactggataatcgcgagaaagaacgtgttgcagcacgtcaggcatggtcagttgttggtacaattaaagacctgaaacagggttatctgagccaggttattcatgaaattgtggatctgatgattcactatcaggccgttgttgtgctggaaaacctgaattttggctttaaaagcaaacgtaccggcattgcagaaaaagcagtttatcagcagttcgagaaaatgctgattgacaaactgaattgcctggtgctgaaagattatccggctgaaaaagttggtggtgttctgaatccgtatcagctgaccgatcagtttaccagctttgcaaaaatgggcacccagagcggatttctgttttatgttccggcaccgtatacgagcaaaattgatccgctgaccggttttgttgatccgtttgtttggaaaaccatcaaaaaccatgaaagccgcaaacattttctggaaggtttcgattttctgcattacgacgttaaaacgggtgatttcatcctgcactttaaaatgaatcgcaatctgagttttcagcgtggcctgcctggttttatgcctgcatgggatattgtgtttgagaaaaacgaaacacagttcgatgcaaaaggcaccccgtttattgcaggtaaacgtattgttccggtgattgaaaatcatcgtttcaccggtcgttatcgcgatctgtatccggcaaatgaactgatcgcactgctggaagagaaaggtattgtttttcgtgatggctcaaacattctgccgaaactgctggaaaatgatgatagccatgcaattgataccatggttgcactgattcgtagcgttctgcagatgcgtaatagcaatgcagcaaccggtgaagattacattaatagtccggttcgtgatctgaatggtgtttgttttgatagccgttttcagaatccggaatggccgatggatgcagatgcaaatggtgcatatcatattgcactgaaaggacagctgctgctgaaccacctgaaagaaagcaaagatctgaaactgcaaaacggcattagcaatcaggattggctggcatatatccaagaactgcgtaacggtcgtagcagtgatgatgaagcaaccgcagatagccagcatgcagcaccgcctaaaaagaaacgtaaagttggtggtagcggtggttcaggtggtagtggcggtagtggtggctcagggggttctggtggctctggtggtagcctcgagcaccaccaccaccaccac

SEQ ID NO: 1113 - DNA, 4089 bp, synthetic construct
  misc_feature 1..4089: note = Cpf1
  misc_feature 3928..3993: note = NLS
  misc_feature 4072..4089: note = His tag
  source 1..4089: mol_type = other DNA
atgacccagtttgaaggtttcaccaatctgtatcaggttagcaaaaccctgcgttttgaactgattccgcagggtaaaaccctgaaacatattcaagaacagggcttcatcgaagaggataaagcacgtaacgatcactacaaagaactgaaaccgattatcgaccgcatctataaaacctatgcagatcagtgtctgcagctggttcagctggattgggaaaatctgagcgcagcaattgatagttatcgcaaagaaaaaaccgaagaaacccgtaatgcactgattgaagaacaggcaacctatcgtaatgccatccatgattatttcattggtcgtaccgataatctgaccgatgcaattaacaaacgtcacgccgaaatctataaaggcctgtttaaagccgaactgtttaatggcaaagttctgaaacagctgggcaccgttaccaccaccgaacatgaaaatgcactgctgcgtagctttgataaattcaccacctatttcagcggcttttatgagaatcgcaaaaacgtgtttagcgcagaagatattagcaccgcaattccgcatcgtattgtgcaggataatttcccgaaattcaaagagaactgccacatttttacccgtctgattaccgcagttccgagcctgcgtgaacattttgaaaacgttaaaaaagccatcggcatctttgttagcaccagcattgaagaagtttttagcttcccgttttacaatcagctgctgacccagacccagattgatctgtataaccaactgctgggtggtattagccgtgaagcaggcaccgaaaaaatcaaaggtctgaatgaagtgctgaatctggccattcagaaaaatgatgaaaccgcacatattattgcaagcctgccgcatcgttttattccgctgttcaaacaaattctgagcgatcgtaataccctgagctttattctggaagaattcaaatccgatgaagaggtgattcagagcttttgcaaatacaaaacgctgctgcgcaatgaaaatgttctggaaactgccgaagcactgtttaacgaactgaatagcattgatctgacccacatctttatcagccacaaaaaactggaaaccatttcaagcgcactgtgtgatcattgggataccctgcgtaatgccctgtatgaacgtcgtattagcgaactgaccggtaaaattaccaaaagcgcgaaagaaaaagttcagcgcagtctgaaacatgaggatattaatctgcaagagattattagcgcagccggtaaagaactgtcagaagcatttaaacagaaaaccagcgaaattctgtcacatgcacatgcagcactggatcagccgctgccgaccaccctgaaaaaacaagaagaaaaagaaatcctgaaaagccagctggatagcctgctgggtctgtatcatctgctggactggtttgcagttgatgaaagcaatgaagttgatccggaatttagcgcacgtctgaccggcattaaactggaaatggaaccgagcctgagcttttataacaaagcccgtaattatgccaccaaaaaaccgtatagcgtcgaaaaattcaaactgaactttcagcgtccgaccctggcaagcggttgggatgttaataaagaaaaaaacaacggtgccatcctgttcgtgaaaaatggcctgtattatctgggtattatgccgaaacagaaaggtcgttataaagcgctgagctttgaaccgacggaaaaaaccagtgaaggttttgataaaatgtactacgactattttccggatgcagccaaaatgattccgaaatgtagcacccagctgaaagcagttaccgcacattttcagacccataccaccccgattctgctgagcaataactttattgaaccgctggaaatcaccaaagagatctacgatctgaataacccggaaaaagagccgaaaaaattccagaccgcatatgcaaaaaaaaccggtgatcagaaaggttatcgtgaagcgctgtgtaaatggattgatttcacccgtgattttctgagcaaatacaccaaaaccaccagtatcgatctgagcagcctgcgtccgagcagccagtataaagatctgggcgaatattatgcagaactgaatccgctgctgtatcatattagctttcagcgtattgccgagaaagaaatcatggacgcagttgaaaccggtaaactgtacctgttccagatctacaataaagattttgccaaaggccatcatggcaaaccgaatctgcataccctgtattggaccggtctgtttagccctgaaaatctggcaaaaacctcgattaaactgaatggtcaggcggaactgttttatcgtccgaaaagccgtatgaaacgtatggcagctcgtctgggtgaaaaaatgctgaacaaaaaactgaaagaccagaaaaccccgatcccggatacactgtatcaagaactgtatgattatgtgaaccatcgtctgagccatgatctgagtgatgaagcacgtgccctgctgccgaatgttattaccaaagaagttagccacgagatcattaaagatcgtcgttttaccagcgacaaattcctgtttcatgtgccgattaccctgaattatcaggcagcaaatagcccgagcaaatttaaccagcgtgttaatgcatatctgaaagaacatccagaaacgccgattattggtattgatcgtggtgaacgtaacctgatttatatcaccgttattgatagcaccggcaaaatcctggaacagcgtagcctgaataccattcagcagtttgattaccagaaaaaactggataatcgcgagaaagaacgtgttgcagcacgtcaggcatggtcagttgttggtacaattaaagacctgaaacagggttatctgagccaggttattcatgaaattgtggatctgatgattcactatcaggccgttgttgtgctggaaaacctgaattttggctttaaaagcaaacgtaccggcattgcagaaaaagcagtttatcagcagttcgagaaaatgctgattgacaaactgaattgcctggtgctgaaagattatccggctgaaaaagttggtggtgttctgaatccgtatcagctgaccgatcagtttaccagctttgcaaaaatgggcacccagagcggatttctgttttatgttccggcaccgtatacgagcaaaattgatccgctgaccggttttgttgatccgtttgtttggaaaaccatcaaaaaccatgaaagccgcaaacattttctggaaggtttcgattttctgcattacgacgttaaaacgggtgatttcatcctgcactttaaaatgaatcgcaatctgagttttcagcgtggcctgcctggttttatgcctgcatgggatattgtgtttgagaaaaacgaaacacagttcgatgcaaaaggcaccccgtttattgcaggtaaacgtattgttccggtgattgaaaatcatcgtttcaccggtcgttatcgcgatctgtatccggcaaatgaactgatcgcactgctggaagagaaaggtattgtttttcgtgatggctcaaacattctgccgaaactgctggaaaatgatgatagccatgcaattgataccatggttgcactgattcgtagcgttctgcagatgcgtaatagcaatgcagcaaccggtgaagattacattaatagtccggttcgtgatctgaatggtgtttgttttgatagccgttttcagaatccggaatggccgatggatgcagatgcaaatggtgcatatcatattgcactgaaaggacagctgctgctgaaccacctgaaagaaagcaaagatctgaaactgcaaaacggcattagcaatcaggattggctggcatatatccaagaactgcgtaacggtcgtagcagtgatgatgaagcaaccgcagatagccagcatgcagcaccgcctaaaaagaaacgtaaagttggtggtagcggtggttcaggtggtagtggcggtagtggtggctcagggggttctggtggctctggtggtagcctcgagcaccaccaccaccaccac

SEQ ID NO: 1114 - DNA, 3993 bp, synthetic construct
  misc_feature 1..3993: note = Cpf1
  misc_feature 3928..3993: note = NLS
  source 1..3993: mol_type = other DNA
atgacccagtttgaaggtttcaccaatctgtatcaggttagcaaaaccctgcgttttgaactgattccgcagggtaaaaccctgaaacatattcaagaacagggcttcatcgaagaggataaagcacgtaacgatcactacaaagaactgaaaccgattatcgaccgcatctataaaacctatgcagatcagtgtctgcagctggttcagctggattgggaaaatctgagcgcagcaattgatagttatcgcaaagaaaaaaccgaagaaacccgtaatgcactgattgaagaacaggcaacctatcgtaatgccatccatgattatttcattggtcgtaccgataatctgaccgatgcaattaacaaacgtcacgccgaaatctataaaggcctgtttaaagccgaactgtttaatggcaaagttctgaaacagctgggcaccgttaccaccaccgaacatgaaaatgcactgctgcgtagctttgataaattcaccacctatttcagcggcttttatgagaatcgcaaaaacgtgtttagcgcagaagatattagcaccgcaattccgcatcgtattgtgcaggataatttcccgaaattcaaagagaactgccacatttttacccgtctgattaccgcagttccgagcctgcgtgaacattttgaaaacgttaaaaaagccatcggcatctttgttagcaccagcattgaagaagtttttagcttcccgttttacaatcagctgctgacccagacccagattgatctgtataaccaactgctgggtggtattagccgtgaagcaggcaccgaaaaaatcaaaggtctgaatgaagtgctgaatctggccattcagaaaaatgatgaaaccgcacatattattgcaagcctgccgcatcgttttattccgctgttcaaacaaattctgagcgatcgtaataccctgagctttattctggaagaattcaaatccgatgaagaggtgattcagagcttttgcaaatacaaaacgctgctgcgcaatgaaaatgttctggaaactgccgaagcactgtttaacgaactgaatagcattgatctgacccacatctttatcagccacaaaaaactggaaaccatttcaagcgcactgtgtgatcattgggataccctgcgtaatgccctgtatgaacgtcgtattagcgaactgaccggtaaaattaccaaaagcgcgaaagaaaaagttcagcgcagtctgaaacatgaggatattaatctgcaagagattattagcgcagccggtaaagaactgtcagaagcatttaaacagaaaaccagcgaaattctgtcacatgcacatgcagcactggatcagccgctgccgaccaccctgaaaaaacaagaagaaaaagaaatcctgaaaagccagctggatagcctgctgggtctgtatcatctgctggactggtttgcagttgatgaaagcaatgaagttgatccggaatttagcgcacgtctgaccggcattaaactggaaatggaaccgagcctgagcttttataacaaagcccgtaattatgccaccaaaaaaccgtatagcgtcgaaaaattcaaactgaactttcagcgtccgaccctggcaagcggttgggatgttaataaagaaaaaaacaacggtgccatcctgttcgtgaaaaatggcctgtattatctgggtattatgccgaaacagaaaggtcgttataaagcgctgagctttgaaccgacggaaaaaaccagtgaaggttttgataaaatgtactacgactattttccggatgcagccaaaatgattccgaaatgtagcacccagctgaaagcagttaccgcacattttcagacccataccaccccgattctgctgagcaataactttattgaaccgctggaaatcaccaaagagatctacgatctgaataacccggaaaaagagccgaaaaaattccagaccgcatatgcaaaaaaaaccggtgatcagaaaggttatcgtgaagcgctgtgtaaatggattgatttcacccgtgattttctgagcaaatacaccaaaaccaccagtatcgatctgagcagcctgcgtccgagcagccagtataaagatctgggcgaatattatgcagaactgaatccgctgctgtatcatattagctttcagcgtattgccgagaaagaaatcatggacgcagttgaaaccggtaaactgtacctgttccagatctacaataaagattttgccaaaggccatcatggcaaaccgaatctgcataccctgtattggaccggtctgtttagccctgaaaatctggcaaaaacctcgattaaactgaatggtcaggcggaactgttttatcgtccgaaaagccgtatgaaacgtatggcagctcgtctgggtgaaaaaatgctgaacaaaaaactgaaagaccagaaaaccccgatcccggatacactgtatcaagaactgtatgattatgtgaaccatcgtctgagccatgatctgagtgatgaagcacgtgccctgctgccgaatgttattaccaaagaagttagccacgagatcattaaagatcgtcgttttaccagcgacaaattcctgtttcatgtgccgattaccctgaattatcaggcagcaaatagcccgagcaaatttaaccagcgtgttaatgcatatctgaaagaacatccagaaacgccgattattggtattgatcgtggtgaacgtaacctgatttatatcaccgttattgatagcaccggcaaaatcctggaacagcgtagcctgaataccattcagcagtttgattaccagaaaaaactggataatcgcgagaaagaacgtgttgcagcacgtcaggcatggtcagttgttggtacaattaaagacctgaaacagggttatctgagccaggttattcatgaaattgtggatctgatgattcactatcaggccgttgttgtgctggaaaacctgaattttggctttaaaagcaaacgtaccggcattgcagaaaaagcagtttatcagcagttcgagaaaatgctgattgacaaactgaattgcctggtgctgaaagattatccggctgaaaaagttggtggtgttctgaatccgtatcagctgaccgatcagtttaccagctttgcaaaaatgggcacccagagcggatttctgttttatgttccggcaccgtatacgagcaaaattgatccgctgaccggttttgttgatccgtttgtttggaaaaccatcaaaaaccatgaaagccgcaaacattttctggaaggtttcgattttctgcattacgacgttaaaacgggtgatttcatcctgcactttaaaatgaatcgcaatctgagttttcagcgtggcctgcctggttttatgcctgcatgggatattgtgtttgagaaaaacgaaacacagttcgatgcaaaaggcaccccgtttattgcaggtaaacgtattgttccggtgattgaaaatcatcgtttcaccggtcgttatcgcgatctgtatccggcaaatgaactgatcgcactgctggaagagaaaggtattgtttttcgtgatggctcaaacattctgccgaaactgctggaaaatgatgatagccatgcaattgataccatggttgcactgattcgtagcgttctgcagatgcgtaatagcaatgcagcaaccggtgaagattacattaatagtccggttcgtgatctgaatggtgtttgttttgatagccgttttcagaatccggaatggccgatggatgcagatgcaaatggtgcatatcatattgcactgaaaggacagctgctgctgaaccacctgaaagaaagcaaagatctgaaactgcaaaacggcattagcaatcaggattggctggcatatatccaagaactgcgtaacggtcgtagcagtgatgatgaagcaaccgcagatagccagcatgcagcaccgcctaaaaagaaacgtaaagtt

SEQ ID NO: 1115 - DNA, 3993 bp, synthetic construct
  misc_feature 1..3993: note = Cpf1
  misc_feature 3928..3993: note = NLS
  source 1..3993: mol_type = other DNA
agcacccagtttgaaggtttcaccaatctgtatcaggttagcaaaaccctgcgttttgaactgattccgcagggtaaaaccctgaaacatattcaagaacagggcttcatcgaagaggataaagcacgtaacgatcactacaaagaactgaaaccgattatcgaccgcatctataaaacctatgcagatcagtgtctgcagctggttcagctggattgggaaaatctgagcgcagcaattgatagttatcgcaaagaaaaaaccgaagaaacccgtaatgcactgattgaagaacaggcaacctatcgtaatgccatccatgattatttcattggtcgtaccgataatctgaccgatgcaattaacaaacgtcacgccgaaatctataaaggcctgtttaaagccgaactgtttaatggcaaagttctgaaacagctgggcaccgttaccaccaccgaacatgaaaatgcactgctgcgtagctttgataaattcaccacctatttcagcggcttttatgagaatcgcaaaaacgtgtttagcgcagaagatattagcaccgcaattccgcatcgtattgtgcaggataatttcccgaaattcaaagagaactgccacatttttacccgtctgattaccgcagttccgagcctgcgtgaacattttgaaaacgttaaaaaagccatcggcatctttgttagcaccagcattgaagaagtttttagcttcccgttttacaatcagctgctgacccagacccagattgatctgtataaccaactgctgggtggtattagccgtgaagcaggcaccgaaaaaatcaaaggtctgaatgaagtgctgaatctggccattcagaaaaatgatgaaaccgcacatattattgcaagcctgccgcatcgttttattccgctgttcaaacaaattctgagcgatcgtaataccctgagctttattctggaagaattcaaatccgatgaagaggtgattcagagcttttgcaaatacaaaacgctgctgcgcaatgaaaatgttctggaaactgccgaagcactgtttaacgaactgaatagcattgatctgacccacatctttatcagccacaaaaaactggaaaccatttcaagcgcactgtgtgatcattgggataccctgcgtaatgccctgtatgaacgtcgtattagcgaactgaccggtaaaattaccaaaagcgcgaaagaaaaagttcagcgcagtctgaaacatgaggatattaatctgcaagagattattagcgcagccggtaaagaactgtcagaagcatttaaacagaaaaccagcgaaattctgtcacatgcacatgcagcactggatcagccgctgccgaccaccctgaaaaaacaagaagaaaaagaaatcctgaaaagccagctggatagcctgctgggtctgtatcatctgctggactggtttgcagttgatgaaagcaatgaagttgatccggaatttagcgcacgtctgaccggcattaaactggaaatggaaccgagcctgagcttttataacaaagcccgtaattatgccaccaaaaaaccgtatagcgtcgaaaaattcaaactgaactttcagcgtccgaccctggcaagcggttgggatgttaataaagaaaaaaacaacggtgccatcctgttcgtgaaaaatggcctgtattatctgggtattatgccgaaacagaaaggtcgttataaagcgctgagctttgaaccgacggaaaaaaccagtgaaggttttgataaaatgtactacgactattttccggatgcagccaaaatgattccgaaatgtagcacccagctgaaagcagttaccgcacattttcagacccataccaccccgattctgctgagcaataactttattgaaccgctggaaatcaccaaagagatctacgatctgaataacccggaaaaagagccgaaaaaattccagaccgcatatgcaaaaaaaaccggtgatcagaaaggttatcgtgaagcgctgtgtaaatggattgatttcacccgtgattttctgagcaaatacaccaaaaccaccagtatcgatctgagcagcctgcgtccgagcagccagtataaagatctgggcgaatattatgcagaactgaatccgctgctgtatcatattagctttcagcgtattgccgagaaagaaatcatggacgcagttgaaaccggtaaactgtacctgttccagatctacaataaagattttgccaaaggccatcatggcaaaccgaatctgcataccctgtattggaccggtctgtttagccctgaaaatctggcaaaaacctcgattaaactgaatggtcaggcggaactgttttatcgtccgaaaagccgtatgaaacgtatggcacatcgtctgggtgaaaaaatgctgaacaaaaaactgaaagaccagaaaaccccgatcccggatacactgtatcaagaactgtatgattatgtgaaccatcgtctgagccatgatctgagtgatgaagcacgtgccctgctgccgaatgttattaccaaagaagttagccacgagatcattaaagatcgtcgttttaccagcgacaaattcctgtttcatgtgccgattaccctgaattatcaggcagcaaatagcccgagcaaatttaaccagcgtgttaatgcatatctgaaagaacatccagaaacgccgattattggtattgatcgtggtgaacgtaacctgatttatatcaccgttattgatagcaccggcaaaatcctggaacagcgtagcctgaataccattcagcagtttgattaccagaaaaaactggataatcgcgagaaagaacgtgttgcagcacgtcaggcatggtcagttgttggtacaattaaagacctgaaacagggttatctgagccaggttattcatgaaattgtggatctgatgattcactatcaggccgttgttgtgctggaaaacctgaattttggctttaaaagcaaacgtaccggcattgcagaaaaagcagtttatcagcagttcgagaaaatgctgattgacaaactgaattgcctggtgctgaaagattatccggctgaaaaagttggtggtgttctgaatccgtatcagctgaccgatcagtttaccagctttgcaaaaatgggcacccagagcggatttctgttttatgttccggcaccgtatacgagcaaaattgatccgctgaccggttttgttgatccgtttgtttggaaaaccatcaaaaaccatgaaagccgcaaacattttctggaaggtttcgattttctgcattacgacgttaaaacgggtgatttcatcctgcactttaaaatgaatcgcaatctgagttttcagcgtggcctgcctggttttatgcctgcatgggatattgtgtttgagaaaaacgaaacacagttcgatgcaaaaggcaccccgtttattgcaggtaaacgtattgttccggtgattgaaaatcatcgtttcaccggtcgttatcgcgatctgtatccggcaaatgaactgatcgcactgctggaagagaaaggtattgtttttcgtgatggctcaaacattctgccgaaactgctggaaaatgatgatagccatgcaattgataccatggttgcactgattcgtagcgttctgcagatgcgtaatagcaatgcagcaaccggtgaagattacattaatagtccggttcgtgatctgaatggtgtttgttttgatagccgttttcagaatccggaatggccgatggatgcagatgcaaatggtgcatatcatattgcactgaaaggacagctgctgctgaaccacctgaaagaaagcaaagatctgaaactgcaaaacggcattagcaatcaggattggctggcatatatccaagaactgcgtaacggtcgtagcagtgatgatgaagcaaccgcagatagccagcatgcagcaccgcctaaaaagaaacgtaaagtt

SEQ ID NO: 1116 - DNA, 4089 bp, synthetic construct
  misc_feature 1..4089: note = Cpf1
  misc_feature 3928..3993: note = NLS
  misc_feature 4072..4089: note = His tag
  source 1..4089: mol_type = other DNA
agcacccagtttgaaggtttcaccaatctgtatcaggttagcaaaaccctgcgttttgaactgattccgcagggtaaaaccctgaaacatattcaagaacagggcttcatcgaagaggataaagcacgtaacgatcactacaaagaactgaaaccgattatcgaccgcatctataaaacctatgcagatcagtgtctgcagctggttcagctggattgggaaaatctgagcgcagcaattgatagttatcgcaaagaaaaaaccgaagaaacccgtaatgcactgattgaagaacaggcaacctatcgtaatgccatccatgattatttcattggtcgtaccgataatctgaccgatgcaattaacaaacgtcacgccgaaatctataaaggcctgtttaaagccgaactgtttaatggcaaagttctgaaacagctgggcaccgttaccaccaccgaacatgaaaatgcactgctgcgtagctttgataaattcaccacctatttcagcggcttttatgagaatcgcaaaaacgtgtttagcgcagaagatattagcaccgcaattccgcatcgtattgtgcaggataatttcccgaaattcaaagagaactgccacatttttacccgtctgattaccgcagttccgagcctgcgtgaacattttgaaaacgttaaaaaagccatcggcatctttgttagcaccagcattgaagaagtttttagcttcccgttttacaatcagctgctgacccagacccagattgatctgtataaccaactgctgggtggtattagccgtgaagcaggcaccgaaaaaatcaaaggtctgaatgaagtgctgaatctggccattcagaaaaatgatgaaaccgcacatattattgcaagcctgccgcatcgttttattccgctgttcaaacaaattctgagcgatcgtaataccctgagctttattctggaagaattcaaatccgatgaagaggtgattcagagcttttgcaaatacaaaacgctgctgcgcaatgaaaatgttctggaaactgccgaagcactgtttaacgaactgaatagcattgatctgacccacatctttatcagccacaaaaaactggaaaccatttcaagcgcactgtgtgatcattgggataccctgcgtaatgccctgtatgaacgtcgtattagcgaactgaccggtaaaattaccaaaagcgcgaaagaaaaagttcagcgcagtctgaaacatgaggatattaatctgcaagagattattagcgcagccggtaaagaactgtcagaagcatttaaacagaaaaccagcgaaattctgtcacatgcacatgcagcactggatcagccgctgccgaccaccctgaaaaaacaagaagaaaaagaaatcctgaaaagccagctggatagcctgctgggtctgtatcatctgctggactggtttgcagttgatgaaagcaatgaagttgatccggaatttagcgcacgtctgaccggcattaaactggaaatggaaccgagcctgagcttttataacaaagcccgtaattatgccaccaaaaaaccgtatagcgtcgaaaaattcaaactgaactttcagcgtccgaccctggcaagcggttgggatgttaataaagaaaaaaacaacggtgccatcctgttcgtgaaaaatggcctgtattatctgggtattatgccgaaacagaaaggtcgttataaagcgctgagctttgaaccgacggaaaaaaccagtgaaggttttgataaaatgtactacgactattttccggatgcagccaaaatgattccgaaatgtagcacccagctgaaagcagttaccgcacattttcagacccataccaccccgattctgctgagcaataactttattgaaccgctggaaatcaccaaagagatctacgatctgaataacccggaaaaagagccgaaaaaattccagaccgcatatgcaaaaaaaaccggtgatcagaaaggttatcgtgaagcgctgtgtaaatggattgatttcacccgtgattttctgagcaaatacaccaaaaccaccagtatcgatctgagcagcctgcgtccgagcagccagtataaagatctgggcgaatattatgcagaactgaatccgctgctgtatcatattagctttcagcgtattgccgagaaagaaatcatggacgcagttgaaaccggtaaactgtacctgttccagatctacaataaagattttgccaaaggccatcatggcaaaccgaatctgcataccctgtattggaccggtctgtttagccctgaaaatctggcaaaaacctcgattaaactgaatggtcaggcggaactgttttatcgtccgaaaagccgtatgaaacgtatggcacatcgtctgggtgaaaaaatgctgaacaaaaaactgaaagaccagaaaaccccgatcccggatacactgtatcaagaactgtatgattatgtgaaccatcgtctgagccatgatctgagtgatgaagcacgtgccctgctgccgaatgttattaccaaagaagttagccacgagatcattaaagatcgtcgttttaccagcgacaaattcctgtttcatgtgccgattaccctgaattatcaggcagcaaatagcccgagcaaatttaaccagcgtgttaatgcatatctgaaagaacatccagaaacgccgattattggtattgatcgtggtgaacgtaacctgatttatatcaccgttattgatagcaccggcaaaatcctggaacagcgtagcctgaataccattcagcagtttgattaccagaaaaaactggataatcgcgagaaagaacgtgttgcagcacgtcaggcatggtcagttgttggtacaattaaagacctgaaacagggttatctgagccaggttattcatgaaattgtggatctgatgattcactatcaggccgttgttgtgctggaaaacctgaattttggctttaaaagcaaacgtaccggcattgcagaaaaagcagtttatcagcagttcgagaaaatgctgattgacaaactgaattgcctggtgctgaaagattatccggctgaaaaagttggtggtgttctgaatccgtatcagctgaccgatcagtttaccagctttgcaaaaatgggcacccagagcggatttctgttttatgttccggcaccgtatacgagcaaaattgatccgctgaccggttttgttgatccgtttgtttggaaaaccatcaaaaaccatgaaagccgcaaacattttctggaaggtttcgattttctgcattacgacgttaaaacgggtgatttcatcctgcactttaaaatgaatcgcaatctgagttttcagcgtggcctgcctggttttatgcctgcatgggatattgtgtttgagaaaaacgaaacacagttcgatgcaaaaggcaccccgtttattgcaggtaaacgtattgttccggtgattgaaaatcatcgtttcaccggtcgttatcgcgatctgtatccggcaaatgaactgatcgcactgctggaagagaaaggtattgtttttcgtgatggctcaaacattctgccgaaactgctggaaaatgatgatagccatgcaattgataccatggttgcactgattcgtagcgttctgcagatgcgtaatagcaatgcagcaaccggtgaagattacattaatagtccggttcgtgatctgaatggtgtttgttttgatagccgttttcagaatccggaatggccgatggatgcagatgcaaatggtgcatatcatattgcactgaaaggacagctgctgctgaaccacctgaaagaaagcaaagatctgaaactgcaaaacggcattagcaatcaggattggctggcatatatccaagaactgcgtaacggtcgtagcagtgatgatgaagcaaccgcagatagccagcatgcagcaccgcctaaaaagaaacgtaaagttggtggtagcggtggttcaggtggtagtggcggtagtggtggctcagggggttctggtggctctggtggtagcctcgagcaccaccaccaccaccac

SEQ ID NO: 1117 - DNA, 4083 bp, synthetic construct
  misc_feature 1..4083: note = Cpf1
  misc_feature 4024..4044: note = NLS
  misc_feature 4066..4083: note = His tag
  source 1..4083: mol_type = other DNA
atgggtcgggatccaggtaaaccgattccgaatccgctgctgggtctggatagcaccgcaccgaaaaaaaaacgtaaagttggtattcatggtgttccggcagcaacccagtttgaaggtttcaccaatctgtatcaggttagcaaaaccctgcgttttgaactgattccgcagggtaaaaccctgaaacatattcaagaacagggcttcatcgaagaggataaagcacgtaacgatcactacaaagaactgaaaccgattatcgaccgcatctataaaacctatgcagatcagtgtctgcagctggttcagctggattgggaaaatctgagcgcagcaattgatagttatcgcaaagaaaaaaccgaagaaacccgtaatgcactgattgaagaacaggcaacctatcgtaatgccatccatgattatttcattggtcgtaccgataatctgaccgatgcaattaacaaacgtcacgccgaaatctataaaggcctgtttaaagccgaactgtttaatggcaaagttctgaaacagctgggcaccgttaccaccaccgaacatgaaaatgcactgctgcgtagctttgataaattcaccacctatttcagcggcttttatgagaatcgcaaaaacgtgtttagcgcagaagatattagcaccgcaattccgcatcgtattgtgcaggataatttcccgaaattcaaagagaactgccacatttttacccgtctgattaccgcagttccgagcctgcgtgaacattttgaaaacgttaaaaaagccatcggcatctttgttagcaccagcattgaagaagtttttagcttcccgttttacaatcagctgctgacccagacccagattgatctgtataaccaactgctgggtggtattagccgtgaagcaggcaccgaaaaaatcaaaggtctgaatgaagtgctgaatctggccattcagaaaaatgatgaaaccgcacatattattgcaagcctgccgcatcgttttattccgctgttcaaacaaattctgagcgatcgtaataccctgagctttattctggaagaattcaaatccgatgaagaggtgattcagagcttttgcaaatacaaaacgctgctgcgcaatgaaaatgttctggaaactgccgaagcactgtttaacgaactgaatagcattgatctgacccacatctttatcagccacaaaaaactggaaaccatttcaagcgcactgtgtgatcattgggataccctgcgtaatgccctgtatgaacgtcgtattagcgaactgaccggtaaaattaccaaaagcgcgaaagaaaaagttcagcgcagtctgaaacatgaggatattaatctgcaagagattattagcgcagccggtaaagaactgtcagaagcatttaaacagaaaaccagcgaaattctgtcacatgcacatgcagcactggatcagccgctgccgaccaccctgaaaaaacaagaagaaaaagaaatcctgaaaagccagctggatagcctgctgggtctgtatcatctgctggactggtttgcagttgatgaaagcaatgaagttgatccggaatttagcgcacgtctgaccggcattaaactggaaatggaaccgagcctgagcttttataacaaagcccgtaattatgccaccaaaaaaccgtatagcgtcgaaaaattcaaactgaactttcagatgccgaccctggcaagcggttgggatgttaataaagaaaaaaacaacggtgccatcctgttcgtgaaaaatggcctgtattatctgggtattatgccgaaacagaaaggtcgttataaagcgctgagctttgaaccgacggaaaaaaccagtgaaggttttgataaaatgtactacgactattttccggatgcagccaaaatgattccgaaatgtagcacccagctgaaagcagttaccgcacattttcagacccataccaccccgattctgctgagcaataactttattgaaccgctggaaatcaccaaagagatctacgatctgaataacccggaaaaagagccgaaaaaattccagaccgcatatgcaaaaaaaaccggtgatcagaaaggttatcgtgaagcgctgtgtaaatggattgatttcacccgtgattttctgagcaaatacaccaaaaccaccagtatcgatctgagcagcctgcgtccgagcagccagtataaagatctgggcgaatattatgcagaactgaatccgctgctgtatcatattagctttcagcgtattgccgagaaagaaatcatggacgcagttgaaaccggtaaactgtacctgttccagatctacaataaagattttgccaaaggccatcatggcaaaccgaatctgcataccctgtattggaccggtctgtttagccctgaaaatctggcaaaaacctcgattaaactgaatggtcaggcggaactgttttatcgtccgaaaagccgtatgaaacgtatggcacatcgtctgggtgaaaaaatgctgaacaaaaaactgaaagaccagaaaaccccgatcccggatacactgtatcaagaactgtatgattatgtgaaccatcgtctgagccatgatctgagtgatgaagcacgtgccctgctgccgaatgttattaccaaagaagttagccacgagatcattaaagatcgtcgttttaccagcgacaaattcttttttcatgtgccgattaccctgaattatcaggcagcaaatagcccgagcaaatttaaccagcgtgttaatgcatatctgaaagaacatccagaaacgccgattattggtattgatcgtggtgaacgtaacctgatttatatcaccgttattgatagcaccggcaaaatcctggaacagcgtagcctgaataccattcagcagtttgattaccagaaaaaactggataatcgcgagaaagaacgtgttgcagcacgtcaggcatggtcagttgttggtacaattaaagacctgaaacagggttatctgagccaggttattcatgaaattgtggatctgatgattcactatcaggccgttgttgtgctggaaaacctgaattttggctttaaaagcaaacgtaccggcattgcagaaaaagcagtttatcagcagttcgagaaaatgctgattgacaaactgaattgcctggtgctgaaagattatccggctgaaaaagttggtggtgttctgaatccgtatcagctgaccgatcagtttaccagctttgcaaaaatgggcacccagagcggatttctgttttatgttccggcaccgtatacgagcaaaattgatccgctgaccggttttgttgatccgtttgtttggaaaaccatcaaaaaccatgaaagccgcaaacattttctggaaggtttcgattttctgcattacgacgttaaaacgggtgatttcatcctgcactttaaaatgaatcgcaatctgagttttcagcgtggcctgcctggttttatgcctgcatgggatattgtgtttgagaaaaacgaaacacagttcgatgcaaaaggcaccccgtttattgcaggtaaacgtattgttccggtgattgaaaatcatcgtttcaccggtcgttatcgcgatctgtatccggcaaatgaactgatcgcactgctggaagagaaaggtattgtttttcgtgatggctcaaacattctgccgaaactgctggaaaatgatgatagccatgcaattgataccatggttgcactgattcgtagcgttctgcagatgcgtaatagcaatgcagcaaccggtgaagattacattaatagtccggttcgtgatctgaatggtgtttgttttgatagccgttttcagaatccggaatggccgatggatgcagatgcaaatggtgcatatcatattgcactgaaaggacagctgctgctgaaccacctgaaagaaagcaaagatctgaaactgcaaaacggcattagcaatcaggattggctggcatatatccaagaactgcgtaaccctaaaaaaaaacgcaaagtgaagcttgcggccgcactcgagcaccaccaccaccaccac

SEQ ID NO: 1118 - DNA, 304 bp, Homo sapiens
  source 1..304: mol_type = other DNA
tcctaaagcttggaacactttcccttccttaagaaccatccttgctactcagctgcaatcaatccagcccccaggtcttcactgaaccttttcccatctcttccaaaacatctgtttctgagaagtcctgtcctatagaggtctttcttcccaccggatttctcctacaccatttactcccacttgcagaactcccgtgtacaagtgtctttactgcttttatttgctcatcaaaatgcacatctcatataaaaataaatgaggagcatgcacacaccacaaacacaaacaggcatgcagaaat

SEQ ID NO: 1119 - DNA, 665 bp, Homo sapiens
  source 1..665: mol_type = other DNA
ataaagatgaacccatagtgagctgagagctccagcctggcctccagataactacacaccaagcttccacccagaatcaagcctatgttaacttccctcaaagcctgagattttgccttcccattaaatgcaggtagttgttccccttcaagcactagtcactggccataatttaaatcttgctatcttcttgccaccatgaaccctgtatgttgtaggctgaagacgttaaaagaaacacacgctgacacacacacacacacgcgcgcgcgcacacacacacacacacacagagctgactttcaaaatctactccagcccaaatgtttcaattgttcctcacccctggacatactttgcccccatctggaattaaaggatataagtttgtaatgaagcattagcagcattttatatgtgtccagctgatataggaatagccttagcaatgtatgtttggccaccaaagttccccactttgactgagccaatatatgccttctgcctgcatctttttaacgaccatacttgtcctgcctccagatagatgttttaaaacaacaaaaatgagggaaagatgaaagttctttctactggaatctaataaagaaaagtcattttcctcatttccacctctcttttctcaaagtcaaaattgtccatct

SEQ ID NO: 1120 - DNA, 165 bp, Homo sapiens
  source 1..165: mol_type = other DNA
ccctaaaacattaccactgggtctcagcccagttagtcctctgcagtttcttcacccccaaccccagtatcttcaaacagctcacaccctgctgtgctcagatcaatactccgttgtctaagttgcctcgagactaaaggcaacagggctgaaacatctcctgga

SEQ ID NO: 1121 - DNA, 122 bp, Homo sapiens
  source 1..122: mol_type = other DNA
ctgtgagattgacaagaacagtttgacagtcagaaggtgccacaaatcctgagaagcgacctggacttttgccaggcacagggtccttccttccctcccttgtcctggtcaccagagcctac

SEQ ID NO: 1122 - DNA, 24 bp, Homo sapiens
  source 1..24: mol_type = other DNA
gccgccggcccctggcctcactgg

SEQ ID NO: 1123 - DNA, 33 bp, Homo sapiens
  source 1..33: mol_type = other DNA
ccttgtcaaggctattggtcaaggcaaggctgg

SEQ ID NO: 1124 - DNA, 36 bp, Homo sapiens
  source 1..36: mol_type = other DNA
tgagatagtgtggggaaggggcccccaagaggatac

SEQ ID NO: 1125 - DNA, 41 bp, Homo sapiens
  source 1..41: mol_type = other DNA
tatagcctttgccttgttccgattcagtcattccagttttt

SEQ ID NO: 1126 - DNA, 114 bp, Homo sapiens
  source 1..114: mol_type = other DNA
tcttccctttagctagtttccttctcccatcatagaggataccaggacttcttttgtcagccgttttttaccttcttgtctctagctccagtgaggcctgtagtttaaagctaa

SEQ ID NO: 1127 - DNA, 86 bp, Homo sapiens
  source 1..86: mol_type = other DNA
ccacagtttcagcgcagtaatagattagtgttacataatataagacctaatgcttacctcaatatctacttatccgtacctatttg

SEQ ID NO: 1128 - DNA, 142 bp, Homo sapiens
  source 1..142: mol_type = other DNA
tattcaggtatgtatgtatacaccagatgatgtgtatttaccactggataagtgtgtgtgctggctgatgacccagggttttggcgtagctcttctatgctcagtaaagatgatggtagaatgttctttggcaggtactgtg

SEQ ID NO: 1129 - DNA, 697 bp, Homo sapiens
  source 1..697: mol_type = other DNA
caataaagatgaacccatagtgagctgagagctccagcctggcctccagataactacacaccaagcttccacccagaatcaagcctatgttaacttccctcaaagcctgagattttgctttcccattaaatgcaggtagttgttcttcttgcagcactagtcactggccataatttaaatcttgttatcttcttgccaccatgaaccctgtatgctgtaggctgaaaacgttaaaagaaacacacgctctcacacacacacaaacacacgcgcgcacacacacacacacacacacagagctgactttcaaaatctactccagcccaaatgtttcaattgttcctcacccctggacatactttgcccccatctggaattaaaggatataagtttgtaatgaagcattagcagcattttatatgtgtccagctgatataggaatagccttagcaatgtatgtttggccaccaaagttccccactttgactgagccaatatatgccttctgcctgcatctttttaatgaccatacttgtcctgcctccagatagatgttttaaaacgaataacaaaaataggggaaaggtgaaagttctttctaccgaaatctaataaagaaaagtcattttcctcatttccacctctcttttctcaaagtcaaagttgtccatctagattttcagaggcactccttagg

SEQ ID NO: 1130 - DNA, 185 bp, Homo sapiens
  source 1..185: mol_type = other DNA
ccctaaaacattgccactgggtctcagcccagttagtcctctgcagtttcttcactcccaaccccagtatcttcaaacagctcacaccctgctgtgctcagatcaatactcagttgtctaagttgcctcgagactaaaggcaacagtgctgaaacatctcctggactcaccttgaagttctcagg

SEQ ID NO: 1131 - DNA, 137 bp, Homo sapiens
  source 1..137: mol_type = other DNA
agcctgtgagattgacaagaacagtttgacagtcagaaggtgccacaaatcctgagaagcgacctggacttttgccaggcacagggtccttccttccctcccttgtcctggtcaccagagcctaccttcccagggtt

SEQ ID NO: 1132 - DNA, 38 bp, Homo sapiens
  source 1..38: mol_type = other DNA
ccgccggcccctggcctcactggatactctaagactat

SEQ ID NO: 1133 - DNA, 31 bp, Homo sapiens
  source 1..31: mol_type = other DNA
ccttgtcaaggctattggtcaaggcaaggct

SEQ ID NO: 1134 - DNA, 75 bp, Homo sapiens
  source 1..75: mol_type = other DNA
cagggaccgtttcagacagatatttgcattgagatagtgtggggaaggggcccccaagaggatactgctgcttaa

SEQ ID NO: 1135 - DNA, 29 bp, Homo sapiens
  source 1..29: mol_type = other DNA
ttgccttgttccgattcagtcattccaat

SEQ ID NO: 1136 - DNA, 104 bp, Homo sapiens
  source 1..104: mol_type = other DNA
tttagctagttttcttctcccaccatagaagataccaggacttcttttgtcagccgtttttcaccttcttgtctgtagctccagtgaggcctgtagtttaaagt

SEQ ID NO: 1137 - DNA, 38 bp, Homo sapiens
  source 1..38: mol_type = other DNA
ggacacgtcttagtctcatttagtaagcattggtttcc

SEQ ID NO: 1138 - DNA, 124 bp, Homo sapiens
  source 1..124: mol_type = other DNA
ttttttatattcaggtatgtatgtaggcacccgatgatgtgtatttatcactggataagtgtatgtgctggctgatgacccagggttttggtgtagctcttctatgctcggtaaagatgatggt

SEQ ID NO: 1139 - RNA, 20 nt, synthetic construct
  misc_feature 1..20: note = gRNA targeting domain - AsCpf1 HBG1 Promoter-1
  source 1..20: mol_type = other RNA
agacagatatttgcattgag

SEQ ID NO: 1140 - DNA, 20 bp, synthetic construct
  misc_feature 1..20: note = gRNA targeting domain - AsCpf1 HBG1 Promoter-1
  source 1..20: mol_type = other DNA
agacagatatttgcattgag

SEQ ID NO: 1141 - RNA, 20 nt, synthetic construct
  misc_feature 1..20: note = gRNA targeting domain - AsCpf1 HBG1 Promoter-2
  source 1..20: mol_type = other RNA
cattgagatagtgtggggaa

SEQ ID NO: 1142 - DNA, 20 bp, synthetic construct
  misc_feature 1..20: note = gRNA targeting domain - AsCpf1 HBG1 Promoter-2
  source 1..20: mol_type = other DNA
cattgagatagtgtggggaa

SEQ ID NO: 1143 - RNA, 20 nt, synthetic construct
  misc_feature 1..20: note = gRNA targeting domain - AsCpf1 HBG1 Promoter-3
  source 1..20: mol_type = other RNA
tagcctttgccttgttccga

SEQ ID NO: 1144 - DNA, 20 bp, synthetic construct
  misc_feature 1..20: note = gRNA targeting domain - AsCpf1 HBG1 Promoter-3
  source 1..20: mol_type = other DNA
tagcctttgccttgttccga

SEQ ID NO: 1145 - RNA, 20 nt, synthetic construct
  misc_feature 1..20: note = gRNA targeting domain - AsCpf1 HBG1 Promoter-4
  source 1..20: mol_type = other RNA
ccttgttccgattcagtcat

SEQ ID NO: 1146 - DNA, 20 bp, synthetic construct
  misc_feature 1..20: note = gRNA targeting domain - AsCpf1 HBG1 Promoter-4
  source 1..20: mol_type = other DNA
ccttgttccgattcagtcat

SEQ ID NO: 1147 - RNA, 20 nt, synthetic construct
  misc_feature 1..20: note = gRNA targeting domain - AsCpf1 HBG1 Promoter-5
  source 1..20: mol_type = other RNA
tctaatttattcttcccttt

SEQ ID NO: 1148 - DNA, 20 bp, synthetic construct
  misc_feature 1..20: note = gRNA targeting domain - AsCpf1 HBG1 Promoter-5
  source 1..20: mol_type = other DNA
tctaatttattcttcccttt

SEQ ID NO: 1149 - RNA, 20 nt, synthetic construct
  misc_feature 1..20: note = gRNA targeting domain - AsCpf1 HBG1 Promoter-6
  source 1..20: mol_type = other RNA
cttctcccatcatagaggat

SEQ ID NO: 1150 - DNA, 20 bp, synthetic construct
  misc_feature 1..20: note = gRNA targeting domain - AsCpf1 HBG1 Promoter-6
  source 1..20: mol_type = other DNA
cttctcccatcatagaggat

SEQ ID NO: 1151 - RNA, 20 nt, synthetic construct
  misc_feature 1..20: note = gRNA targeting domain - AsCpf1 HBG2 Promoter-7
  source 1..20: mol_type = other RNA
ttctcccaccatagaagata

SEQ ID NO: 1152 - DNA, 20 bp, synthetic construct
  misc_feature 1..20: note = gRNA targeting domain - AsCpf1 HBG2 Promoter-7
  source 1..20: mol_type = other DNA
ttctcccaccatagaagata

SEQ ID NO: 1153 - RNA, 20 nt, synthetic construct
  misc_feature 1..20: note = gRNA targeting domain - AsCpf1 HBG1 Promoter-8
  source 1..20: mol_type = other RNA
ccactggataagtgtgtgtg

SEQ ID NO: 1154 - DNA, 20 bp, synthetic construct
  misc_feature 1..20: note = gRNA targeting domain - AsCpf1 HBG1 Promoter-8
  source 1..20: mol_type = other DNA
ccactggataagtgtgtgtg

SEQ ID NO: 1155 - RNA, 20 nt, synthetic construct
  misc_feature 1..20: note = gRNA targeting domain - AsCpf1 HBG1 Promoter-9
  source 1..20: mol_type = other RNA
gcgtagctcttctatgctca

SEQ ID NO: 1156 - DNA, 20 bp, synthetic construct
  misc_feature 1..20: note = gRNA targeting domain - AsCpf1 HBG1 Promoter-9
  source 1..20: mol_type = other DNA
gcgtagctcttctatgctca

SEQ ID NO: 1157 - RNA, 20 nt, synthetic construct
  misc_feature 1..20: note = gRNA targeting domain - AsCpf1 HBG1 Promoter-10
  source 1..20: mol_type = other RNA
ctgagcatagaagagctacg

SEQ ID NO: 1158 - DNA, 20 bp, synthetic construct
  misc_feature 1..20: note = gRNA targeting domain - AsCpf1 HBG1 Promoter-10
  source 1..20: mol_type = other DNA
ctgagcatagaagagctacg

SEQ ID NO: 1159 - RNA, 20 nt, synthetic construct
  misc_feature 1..20: note = gRNA targeting domain - AsCpf1 HBG2 Promoter-11
  source 1..20: mol_type = other RNA
tcactggataagtgtatgtg

SEQ ID NO: 1160 - DNA, 20 bp, synthetic construct
  misc_feature 1..20: note = gRNA targeting domain - AsCpf1 HBG2 Promoter-11
  source 1..20: mol_type = other DNA
tcactggataagtgtatgtg

SEQ ID NO: 1161 - RNA, 20 nt, synthetic construct
  misc_feature 1..20: note = gRNA targeting domain - AsCpf1 HBG2 Promoter-12
  source 1..20: mol_type = other RNA
gtgtagctcttctatgctcg

SEQ ID NO: 1162 - DNA, 20 bp, synthetic construct
  misc_feature 1..20: note = gRNA targeting domain - AsCpf1 HBG2 Promoter-12
  source 1..20: mol_type = other DNA
gtgtagctcttctatgctcg

SEQ ID NO: 1163 - RNA, 20 nt, synthetic construct
  misc_feature 1..20: note = gRNA targeting domain - AsCpf1 HBG2 Promoter-13
  source 1..20: mol_type = other RNA
ccgagcatagaagagctaca

SEQ ID NO: 1164 - DNA, 20 bp, synthetic construct
  misc_feature 1..20: note = gRNA targeting domain - AsCpf1 HBG2 Promoter-13
  source 1..20: mol_type = other DNA
ccgagcatagaagagctaca

SEQ ID NO: 1165-1166 - skipped (2 entries)

SEQ ID NO: 1167 - RNA, 20 nt, synthetic construct
  misc_feature 1..20: note = gRNA targeting domain - AsCpf1 RR HBG1 Promoter-1
  source 1..20: mol_type = other RNA
gacagatatttgcattgaga

SEQ ID NO: 1168 - DNA, 20 bp, synthetic construct
  misc_feature 1..20: note = gRNA targeting domain - AsCpf1 RR HBG1 Promoter-1
  source 1..20: mol_type = other DNA
gacagatatttgcattgaga

SEQ ID NO: 1169 - RNA, 20 nt, synthetic construct
  misc_feature 1..20: note = gRNA targeting domain - AsCpf1 RR HBG1 Promoter-2
  source 1..20: mol_type = other RNA
acactatctcaatgcaaata

SEQ ID NO: 1170 - DNA, 20 bp, synthetic construct
  misc_feature 1..20: note = gRNA targeting domain - AsCpf1 RR HBG1 Promoter-2
  source 1..20: mol_type = other DNA
acactatctcaatgcaaata

SEQ ID NO: 1171 - RNA, 20 nt, synthetic construct
  misc_feature 1..20: note = gRNA targeting domain - AsCpf1 RR HBG1 Promoter-3
  source 1..20: mol_type = other RNA
cacactatctcaatgcaaat

SEQ ID NO: 1172 - DNA, 20 bp, synthetic construct
  misc_feature 1..20: note = gRNA targeting domain - AsCpf1 RR HBG1 Promoter-3
  source 1..20: mol_type = other DNA
cacactatctcaatgcaaat

SEQ ID NO: 1173 - RNA, 20 nt, synthetic construct
  misc_feature 1..20: note = gRNA targeting domain - AsCpf1 RR HBG1 Promoter-4
  source 1..20: mol_type = other RNA
ccacactatctcaatgcaaa

SEQ ID NO: 1174 - DNA, 20 bp, synthetic construct
  misc_feature 1..20: note = gRNA targeting domain - AsCpf1 RR HBG1 Promoter-4
  source 1..20: mol_type = other DNA
ccacactatctcaatgcaaa

SEQ ID NO: 1175 - RNA, 20 nt, synthetic construct
  misc_feature 1..20: note = gRNA targeting domain - AsCpf1 RR HBG1 Promoter-5
  source 1..20: mol_type = other RNA
ttccccacactatctcaatg

SEQ ID NO: 1176 - DNA, 20 bp, synthetic construct
  misc_feature 1..20: note = gRNA targeting domain - AsCpf1 RR HBG1 Promoter-5
  source 1..20: mol_type = other DNA
ttccccacactatctcaatg

SEQ ID NO: 1177 - RNA, 20 nt, synthetic construct
  misc_feature 1..20: note = gRNA targeting domain - AsCpf1 RR HBG1 Promoter-6
  source 1..20: mol_type = other RNA
gattcagtcattccagtttt

SEQ ID NO: 1178 - DNA, 20 bp, synthetic construct
  misc_feature 1..20: note = gRNA targeting domain - AsCpf1 RR HBG1 Promoter-6
  source 1..20: mol_type = other DNA
gattcagtcattccagtttt

SEQ ID NO: 1179 - RNA, 20 nt, synthetic construct
  misc_feature 1..20: note = gRNA targeting domain - AsCpf1 RR HBG1 Promoter-7
  source 1..20: mol_type = other RNA
attcagtcattccagttttt

SEQ ID NO: 1180 - DNA, 20 bp, synthetic construct
  misc_feature 1..20: note = gRNA targeting domain - AsCpf1 RR HBG1 Promoter-7
  source 1..20: mol_type = other DNA
attcagtcattccagttttt

SEQ ID NO: 1181 - RNA, 20 nt, synthetic construct
  misc_feature 1..20: note = gRNA targeting domain - AsCpf1 RR HBG1 Promoter-8
  source 1..20: mol_type = other RNA
gtcattccagtttttctcta

SEQ ID NO: 1182 - DNA, 20 bp, synthetic construct
  misc_feature 1..20: note = gRNA targeting domain - AsCpf1 RR HBG1 Promoter-8
  source 1..20: mol_type = other DNA
gtcattccagtttttctcta

SEQ ID NO: 1183 - RNA, 20 nt, synthetic construct
  misc_feature 1..20: note = gRNA targeting domain - AsCpf1 RR HBG1 Promoter-9
  source 1..20: mol_type = other RNA
agtttttctctaatttattc

SEQ ID NO: 1184 - DNA, 20 bp, synthetic construct
  misc_feature 1..20: note = gRNA targeting domain - AsCpf1 RR HBG1 Promoter-9
  source 1..20: mol_type = other DNA
agtttttctctaatttattc

SEQ ID NO: 1185 - RNA, 20 nt, synthetic construct
  misc_feature 1..20: note = gRNA targeting domain - AsCpf1 RR HBG1 Promoter-10
  source 1..20: mol_type = other RNA
gtttttctctaatttattct

SEQ ID NO: 1186 - DNA, 20 bp, synthetic construct
  misc_feature 1..20: note = gRNA targeting domain - AsCpf1 RR HBG1 Promoter-10
  source 1..20: mol_type = other DNA
gtttttctctaatttattct

SEQ ID NO: 1187 - RNA, 20 nt, synthetic construct
  misc_feature 1..20: note = gRNA targeting domain - AsCpf1 RR HBG2 Promoter-11
  source 1..20: mol_type = other RNA
gattcagtcattccaatttt

SEQ ID NO: 1188 - DNA, 20 bp, synthetic construct
  misc_feature 1..20: note = gRNA targeting domain - AsCpf1 RR HBG2 Promoter-11
  source 1..20: mol_type = other DNA
caagaggatactgctgctta

SEQ ID NO: 1189 - RNA, 20 nt, synthetic construct
  misc_feature 1..20: note = gRNA targeting domain - AsCpf1 RR HBG2 Promoter-12
  source 1..20: mol_type = other RNA
attcagtcattccaattttt

SEQ ID NO: 1190 - DNA, 20 bp, synthetic construct
  misc_feature 1..20: note = gRNA targeting domain - AsCpf1 RR HBG2 Promoter-12
  source 1..20: mol_type = other DNA
aagaggatactgctgcttaa

SEQ ID NO: 1191 - RNA, 20 nt, synthetic construct
  misc_feature 1..20: note = gRNA targeting domain - AsCpf1 RR HBG2 Promoter-13
  source 1..20: mol_type = other RNA
gtcattccaatttttctcta

SEQ ID NO: 1192 - DNA, 20 bp, synthetic construct
  misc_feature 1..20: note = gRNA targeting domain - AsCpf1 RR HBG2 Promoter-13
  source 1..20: mol_type = other DNA
gattcagtcattccaatttt

SEQ ID NO: 1193 - RNA, 20 nt, synthetic construct
  misc_feature 1..20: note = gRNA targeting domain - AsCpf1 RR HBG2 Promoter-14
  source 1..20: mol_type = other RNA
aatttttctctaatttattc

SEQ ID NO: 1194 - DNA, 20 bp, synthetic construct
  misc_feature 1..20: note = gRNA targeting domain - AsCpf1 RR HBG2 Promoter-14
  source 1..20: mol_type = other DNA
attcagtcattccaattttt

SEQ ID NO: 1195 - RNA, 20 nt, synthetic construct
  misc_feature 1..20: note = gRNA targeting domain - AsCpf1 RR HBG2 Promoter-15
  source 1..20: mol_type = other RNA
atttttctctaatttattct

SEQ ID NO: 1196 - DNA, 20 bp, synthetic construct
  misc_feature 1..20: note = gRNA targeting domain - AsCpf1 RR HBG2 Promoter-15
  source 1..20: mol_type = other DNA
gtcattccaatttttctcta

SEQ ID NO: 1197 - RNA, 20 nt, synthetic construct
  misc_feature 1..20: note = gRNA targeting domain - AsCpf1 RR HBG2 Promoter-16
  source 1..20: mol_type = other RNA
ttctcccatcatagaggata

SEQ ID NO: 1198 - DNA, 20 bp, synthetic construct
  misc_feature 1..20: note = gRNA targeting domain - AsCpf1 RR HBG2 Promoter-16
  source 1..20: mol_type = other DNA
aatttttctctaatttattc

SEQ ID NO: 1199 - RNA, 20 nt, synthetic construct
  misc_feature 1..20: note = gRNA targeting domain - AsCpf1 RR HBG2 Promoter-17
  source 1..20: mol_type = other RNA
atcatagaggataccaggac

SEQ ID NO: 1200 - DNA, 20 bp, synthetic construct
  misc_feature 1..20: note = gRNA targeting domain - AsCpf1 RR HBG2 Promoter-17
  source 1..20: mol_type = other DNA
atttttctctaatttattct

SEQ ID NO: 1201 - RNA, 20 nt, synthetic construct
  misc_feature 1..20: note = gRNA targeting domain - AsCpf1 RR HBG1 Promoter-18
  source 1..20: mol_type = other RNA
accatagaagataccaggac

SEQ ID NO: 1202 - DNA, 20 bp, synthetic construct
  misc_feature 1..20: note = gRNA targeting domain - AsCpf1 RR HBG1 Promoter-18
  source 1..20: mol_type = other DNA
ttctcccatcatagaggata

SEQ ID NO: 1203 - RNA, 20 nt, synthetic construct
  misc_feature 1..20: note = gRNA targeting domain - AsCpf1 RR HBG1 Promoter-19
  source 1..20: mol_type = other RNA
cagtacctgccaaagaacat

SEQ ID NO: 1204 - DNA, 20 bp, synthetic construct
  misc_feature 1..20: note = gRNA targeting domain - AsCpf1 RR HBG1 Promoter-19
  source 1..20: mol_type = other DNA
atcatagaggataccaggac

SEQ ID NO: 1205 - RNA, 20 nt, synthetic construct
  misc_feature 1..20: note = gRNA targeting domain - AsCpf1 RR HBG2 Promoter-20
  source 1..20: mol_type = other RNA
tagtatctggtaaagagcat

SEQ ID NO: 1206 - DNA, 20 bp, synthetic construct
  misc_feature 1..20: note = gRNA targeting domain - AsCpf1 RR HBG2 Promoter-20
  source 1..20: mol_type = other DNA
accatagaagataccaggac

SEQ ID NO: 1207 - RNA, 20 nt, synthetic construct
  misc_feature 1..20: note = gRNA targeting domain - AsCpf1 RR HBG1 Promoter-21
  source 1..20: mol_type = other RNA
tcaatgcaaatatctgtctg

SEQ ID NO: 1208 - DNA, 20 bp, synthetic construct
  misc_feature 1..20: note = gRNA targeting domain - AsCpf1 RR HBG1 Promoter-21
  source 1..20: mol_type = other DNA
cagtacctgccaaagaacat

SEQ ID NO: 1209 - RNA, 20 nt, synthetic construct
  misc_feature 1..20: note = gRNA targeting domain - AsCpf1 RR HBG2 Promoter-22
  source 1..20: mol_type = other RNA
ctcttgggggccccttcccc

SEQ ID NO: 1210 - DNA, 20 bp, synthetic construct
  misc_feature 1..20: note = gRNA targeting domain - AsCpf1 RR HBG2 Promoter-22
  source 1..20: mol_type = other DNA
tagtatctggtaaagagcat

SEQ ID NO: 1211 - RNA, 20 nt, synthetic construct
  misc_feature 1..20: note = gRNA targeting domain - AsCpf1 RVR HBG1 Promoter-1
  source 1..20: mol_type = other RNA
gattcagtcattccaatttt

SEQ ID NO: 1212 - DNA, 20 bp, synthetic construct
  misc_feature 1..20: note = gRNA targeting domain - AsCpf1 RVR HBG1 Promoter-1
  source 1..20: mol_type = other DNA
tcaatgcaaatatctgtctg

SEQ ID NO: 1213 - RNA, 20 nt, synthetic construct
  misc_feature 1..20: note = gRNA targeting domain - AsCpf1 RVR HBG1 Promoter-2
  source 1..20: mol_type = other RNA
attcagtcattccaattttt

SEQ ID NO: 1214 - DNA, 20 bp, synthetic construct
  misc_feature 1..20: note = gRNA targeting domain - AsCpf1 RVR HBG1 Promoter-2
  source 1..20: mol_type = other DNA
ctcttgggggccccttcccc

SEQ ID NO: 1215 - RNA, 20 nt, synthetic construct
  misc_feature 1..20: note = gRNA targeting domain - AsCpf1 RVR HBG1 Promoter-3
  source 1..20: mol_type = other RNA
aaaaaaattagcagtatcct

SEQ ID NO: 1216 - DNA, 20 bp, synthetic construct
  misc_feature 1..20: note = gRNA targeting domain - AsCpf1 RVR HBG1 Promoter-3
  source 1..20: mol_type = other DNA
aaaaaaattagcagtatcct

SEQ ID NO: 1217 - RNA, 20 nt, synthetic construct
  misc_feature 1..20: note = gRNA targeting domain - AsCpf1 RVR HBG1 Promoter-4
  source 1..20: mol_type = other RNA
gcctttgccttgttccgatt

SEQ ID NO: 1218 - DNA, 20 bp, synthetic construct
  misc_feature 1..20: note = gRNA targeting domain - AsCpf1 RVR HBG1 Promoter-4
  source 1..20: mol_type = other DNA
gcctttgccttgttccgatt

SEQ ID NO: 1219 - RNA, 20 nt, synthetic construct
  misc_feature 1..20: note = gRNA targeting domain - AsCpf1 RVR HBG2 Promoter-5
  source 1..20: mol_type = other RNA
aaaaaaattaagcagcagta

SEQ ID NO: 1220 - DNA, 20 bp, synthetic construct
  misc_feature 1..20: note = gRNA targeting domain - AsCpf1 RVR HBG2 Promoter-5
  source 1..20: mol_type = other DNA
aaaaaaattaagcagcagta

SEQ ID NO: 1221 - RNA, 20 nt, synthetic construct
  misc_feature 1..20: note = gRNA targeting domain - AsCpf1 RVR HBG1 Promoter-6
  source 1..20: mol_type = other RNA
ctcagtaaagatgatggtag

SEQ ID NO: 1222 - DNA, 20 bp, synthetic construct
  misc_feature 1..20: note = gRNA targeting domain - AsCpf1 RVR HBG1 Promoter-6
  source 1..20: mol_type = other DNA
ctcagtaaagatgatggtag

SEQ ID NO: 1223 - RNA, 20 nt, synthetic construct
  misc_feature 1..20: note = gRNA targeting domain - AsCpf1 RVR HBG2 Promoter-7
  source 1..20: mol_type = other RNA
actggataagtgtatgtgct

SEQ ID NO: 1224 - DNA, 20 bp, synthetic construct
  misc_feature 1..20: note = gRNA targeting domain - AsCpf1 RVR HBG2 Promoter-7
  source 1..20: mol_type = other DNA
actggataagtgtatgtgct

SEQ ID NO: 1225 - RNA, 20 nt, synthetic construct
  misc_feature 1..20: note = gRNA targeting domain - AsCpf1 RVR HBG2 Promoter-8
  source 1..20: mol_type = other RNA
tgctggctgatgacccaggg

SEQ ID NO: 1226 - DNA, 20 bp, synthetic construct
  misc_feature 1..20: note = gRNA targeting domain - AsCpf1 RVR HBG2 Promoter-8
  source 1..20: mol_type = other DNA
tgctggctgatgacccaggg

SEQ ID NO: 1227 - RNA, 20 nt, synthetic construct
  misc_feature 1..20: note = gRNA targeting domain - AsCpf1 RVR HBG2 Promoter-9
  source 1..20: mol_type = other RNA
ctcggtaaagatgatggtag

SEQ ID NO: 1228 - DNA, 20 bp, synthetic construct
  misc_feature 1..20: note = gRNA targeting domain - AsCpf1 RVR HBG2 Promoter-9
  source 1..20: mol_type = other DNA
ctcggtaaagatgatggtag

SEQ ID NO: 1229 - RNA, 20 nt, synthetic construct
  misc_feature 1..20: note = gRNA targeting domain - AsCpf1 RVR HBG2 Promoter-10
  source 1..20: mol_type = other RNA
tggtaaagagcattctacca

SEQ ID NO: 1230 - DNA, 20 bp, synthetic construct
  misc_feature 1..20: note = gRNA targeting domain - AsCpf1 RVR HBG2 Promoter-10
  source 1..20: mol_type = other DNA
tggtaaagagcattctacca

SEQ ID NO: 1231 - skipped

SEQ ID NO: 1232 - RNA, 10 nt, synthetic construct
  misc_feature 1..10: note = +10 RNA gRNA 5' extension
  source 1..10: mol_type = other RNA
aagacctttt

SEQ ID NO: 1233 - RNA, 25 nt, synthetic construct
  misc_feature 1..25: note = +25 RNA gRNA 5' extension
  source 1..25: mol_type = other RNA
atgtgtttttgtcaaaagacctttt

SEQ ID NO: 1234 - RNA, 60 nt, synthetic construct
  misc_feature 1..60: note = +60 RNA gRNA 5' extension
  source 1..60: mol_type = other RNA
aggccagcttgccggttttttagtcgtgctgcttcatgtgtttttgtcaaaagacctttt

SEQ ID NO: 1235 - skipped

SEQ ID NO: 1236 - DNA, 10 bp, synthetic construct
  misc_feature 1..10: note = +10 DNA gRNA 5' extension
  source 1..10: mol_type = other DNA
aagacctttt

SEQ ID NO: 1237 - DNA, 25 bp, synthetic construct
  misc_feature 1..25: note = +25 DNA gRNA 5' extension
  source 1..25: mol_type = other DNA
atgtgtttttgtcaaaagacctttt

SEQ ID NO: 1238 - DNA, 60 bp, synthetic construct
  misc_feature 1..60: note = +60 DNA gRNA 5' extension
  source 1..60: mol_type = other DNA
aggccagcttgccggttttttagtcgtgctgcttcatgtgtttttgtcaaaagacctttt

SEQ ID NO: 1239 - DNA, 20 bp, synthetic construct
  misc_feature 1..20: note = +20 DNA gRNA 5' extension
  source 1..20: mol_type = other DNA
tttttgtcaaaagacctttt

SEQ ID NO: 1240 - DNA, 30 bp, synthetic construct
  misc_feature 1..30: note = +30 DNA gRNA 5' extension
  source 1..30: mol_type = other DNA
gcttcatgtgtttttgtcaaaagacctttt

SEQ ID NO: 1241 - DNA, 50 bp, synthetic construct
  misc_feature 1..50: note = +50 DNA gRNA 5' extension
  source 1..50: mol_type = other DNA
gccggttttttagtcgtgctgcttcatgtgtttttgtcaaaagacctttt

SEQ ID NO: 1242 - DNA, 40 bp, synthetic construct
  misc_feature 1..40: note = +40 DNA gRNA 5' extension
  source 1..40: mol_type = other DNA
tagtcgtgctgcttcatgtgtttttgtcaaaagacctttt

SEQ ID NO: 1243 - DNA, 20 bp, synthetic construct
  misc_feature 1..20: note = +20 DNA/2xPS gRNA 5' extension
  misc_feature 1..2: note = Linked by phosphorothioate (PS) bond
  misc_feature 2..3: note = Linked by phosphorothioate (PS) bond
  source 1..20: mol_type = other DNA
ccgaagttttcttcggtttt

SEQ ID NO: 1244 - DNA, 25 bp, synthetic construct
  misc_feature 1..25: note = +25 DNA/2xPS gRNA 5' extension
  misc_feature 1..2: note = Linked by phosphorothioate (PS) bond
  misc_feature 2..3: note = Linked by phosphorothioate (PS) bond
  source 1..25: mol_type = other DNA
tttttccgaagttttcttcggtttt

SEQ ID NO: 1245 - DNA, 30 bp, synthetic construct
  misc_feature 1..30: note = +30 DNA/2xPS gRNA 5' extension
  misc_feature 1..2: note = Linked by phosphorothioate (PS) bond
  misc_feature 2..3: note = Linked by phosphorothioate (PS) bond
  source 1..30: mol_type = other DNA
aacgctttttccgaagttttcttcggtttt

SEQ ID NO: 1246 - DNA, 41 bp, synthetic construct
  misc_feature 1..41: note = +41 DNA/2xPS gRNA 5' extension
  misc_feature 1..2: note = Linked by phosphorothioate (PS) bond
  misc_feature 2..3: note = Linked by phosphorothioate (PS) bond
  source 1..41: mol_type = other DNA
gcgttgttttcaacgctttttccgaagttttcttcggtttt

SEQ ID NO: 1247 - DNA, 62 bp, synthetic construct
  misc_feature 1..62: note = +62 DNA/2xPS gRNA 5' extension
  misc_feature 1..2: note = Linked by phosphorothioate (PS) bond
  misc_feature 2..3: note = Linked by phosphorothioate (PS) bond
  source 1..62: mol_type = other DNA
ggcttcttttgaagcctttttgcgttgttttcaacgctttttccgaagttttcttcggtttt

SEQ ID NO: 1248 - DNA, 25 bp, synthetic construct
  misc_feature 1..25: note = +25 DNA/2xPS gRNA 5' extension
  misc_feature 1..2: note = Linked by phosphorothioate (PS) bond
  misc_feature 2..3: note = Linked by phosphorothioate (PS) bond
  source 1..25: mol_type = other DNA
atgtgtttttgtcaaaagacctttt

SEQ ID NO: 1249 - DNA, 25 bp, synthetic construct
  misc_feature 1..25: note = +25 A gRNA 5' extension
  source 1..25: mol_type = other DNA
aaaaaaaaaaaaaaaaaaaaaaaaa

SEQ ID NO: 1250 - DNA, 25 bp, synthetic construct
  misc_feature 1..25: note = +25 T gRNA 5' extension
  source 1..25: mol_type = other DNA
ttttttttttttttttttttttttt

SEQ ID NO: 1251 - RNA, 25 nt, synthetic construct
  misc_feature 1..25: note = +25 RNA/2xPS gRNA 5' extension
  misc_feature 1..2: note = Linked by phosphorothioate (PS) bond
  misc_feature 1: note = Modified to contain 2'-O-methyl
  misc_feature 2: note = Modified to contain 2'-O-methyl
  misc_feature 2..3: note = Linked by phosphorothioate (PS) bond
  source 1..25: mol_type = other RNA
atgtgtttttgtcaaaagacctttt

SEQ ID NO: 1252 - RNA, 25 nt, synthetic construct
  misc_feature 1..25: note = +25 polyA RNA/2xPS gRNA 5' extension
  misc_feature 1..2: note = Linked by phosphorothioate (PS) bond
  misc_feature 1: note = Modified to contain 2'-O-methyl
  misc_feature 2: note = Modified to contain 2'-O-methyl
  misc_feature 2..3: note = Linked by phosphorothioate (PS) bond
  source 1..25: mol_type = other RNA
aaaaaaaaaaaaaaaaaaaaaaaaa

SEQ ID NO: 1253 - RNA, 25 nt, synthetic construct
  misc_feature 1..25: note = +25 polyU RNA/2xPS gRNA 5' extension
  misc_feature 1..2: note = Linked by phosphorothioate (PS) bond
  misc_feature 1: note = Modified to contain 2'-O-methyl
  misc_feature 2: note = Modified to contain 2'-O-methyl
  misc_feature 2..3: note = Linked by phosphorothioate (PS) bond
  source 1..25: mol_type = other RNA
ttttttttttttttttttttttttt

SEQ ID NO: 1254 - RNA, 21 nt, synthetic construct
  misc_feature 1..21: note = HBG1-1 21mer targeting domain
  source 1..21: mol_type = other RNA
ccttgtcaaggctattggtca

SEQ ID NO: 1255 - DNA, 21 bp, synthetic construct
  misc_feature 1..21: note = HBG1-1 21mer targeting domain
  source 1..21: mol_type = other DNA
ccttgtcaaggctattggtca

SEQ ID NO: 1256 - RNA, 22 nt, synthetic construct
  misc_feature 1..22: note = HBG1-1 22mer targeting domain
  source 1..22: mol_type = other RNA
ccttgtcaaggctattggtcaa

SEQ ID NO: 1257 - DNA, 22 bp, synthetic construct
  misc_feature 1..22: note = HBG1-1 22mer targeting domain
  source 1..22: mol_type = other DNA
ccttgtcaaggctattggtcaa

SEQ ID NO: 1258 - RNA, 23 nt, synthetic construct
  misc_feature 1..23: note = HBG1-1 23mer targeting domain
  source 1..23: mol_type = other RNA
ccttgtcaaggctattggtcaag

SEQ ID NO: 1259 - DNA, 23 bp, synthetic construct
  misc_feature 1..23: note = HBG1-1 23mer targeting domain
  source 1..23: mol_type = other DNA
ccttgtcaaggctattggtcaag

SEQ ID NO: 1260 - RNA, 21 nt, synthetic construct
  misc_feature 1..21: note = AsCpf1 HBG1 promoter-1 21mer targeting domain
  source 1..21: mol_type = other RNA
agacagatatttgcattgaga

SEQ ID NO: 1261 - DNA, 21 bp, synthetic construct
  misc_feature 1..21: note = AsCpf1 HBG1 promoter-1 21mer targeting domain
  source 1..21: mol_type = other DNA
agacagatatttgcattgaga

SEQ ID NO: 1262 - RNA, 21 nt, synthetic construct
  misc_feature 1..21: note = AsCpf1 HBG1 promoter-2 21mer targeting domain
  source 1..21: mol_type = other RNA
cattgagatagtgtggggaag

SEQ ID NO: 1263 - DNA, 21 bp, synthetic construct
  misc_feature 1..21: note = AsCpf1 HBG1 promoter-2 21mer targeting domain
  source 1..21: mol_type = other DNA
cattgagatagtgtggggaag

SEQ ID NO: 1264 - RNA, 21 nt, synthetic construct
  misc_feature 1..21: note = AsCpf1 HBG1 promoter-6 21mer targeting domain
  source 1..21: mol_type = other RNA
cttctcccatcatagaggata

SEQ ID NO: 1265 - DNA, 21 bp, synthetic construct
  misc_feature 1..21: note = AsCpf1 HBG1 promoter-6 21mer targeting domain
  source 1..21: mol_type = other DNA
cttctcccatcatagaggata

SEQ ID NO: 1266 - DNA, 125 bp, synthetic construct
  misc_feature 1..125: note = synthetic
  source 1..125: mol_type = other DNA
gaggtctgccagtcctcttctaccccacccacgcccccaccctaatcagaggccaaacccttcctggagcctgtgataaaagcaactgttagcttgcactagactagcttcaaagttgtattgac

SEQ ID NO: 1267 - DNA, 82 bp, synthetic construct
  misc_feature 1..82: note = synthetic
  source 1..82: mol_type = other DNA
gcctcactggatactctaagactattggtcaagtttgccttgtcaaggctattggtcaaggcaaggctggccaacccatggg

SEQ ID NO: 1268 - DNA, 82 bp, synthetic construct
  misc_feature 1..82: note = synthetic
  source 1..82: mol_type = other DNA
cggagtgacctatgagattctgataaccagttcaaacggaacagttccgataaccagttccgttccgaccggttgggtaccc

SEQ ID NO: 1269 - DNA, 82 bp, Homo sapiens; identical to SEQ ID NO: 1267
  source 1..82: mol_type = other DNA

SEQ ID NO: 1270 - DNA, 82 bp, Homo sapiens; identical to SEQ ID NO: 1268
  source 1..82: mol_type = other DNA

1-15. (canceled)

16. A genome editing system comprising:
a nucleic acid encoding a Cpf1 variant comprising one or more modifications selected from the group consisting of one or more mutations in a wild-type Cpf1 amino acid sequence, one or more nuclear localization signals, one or more purification tags, and a combination thereof, and
a guide (gRNA) comprising:
a 5′ end and a 3′ end,
a DNA extension at the 5′ end, wherein the DNA extension comprises a sequence selected from the group consisting of SEQ ID NOs: 1235-1250,
a targeting domain that is complementary to a target site in a promoter of a gamma-globin (HBG) gene, wherein the target site comprises nucleotides located between Chr 11 (NC_000011.10) 5,249,955-5,249,987; Chr 11 (NC_000011.10) 5,254,879-5,254,909; or a combination thereof, and
an RNA segment capable of associating with the Cpf1 variant.

17. The genome editing system of claim 16, wherein the targeting domain comprises a sequence selected from the group consisting of SEQ ID NOs: 1002, 1004, 1139, 1141, 1143, 1145, 1147, 1149, 1151, 1153, 1155, 1157, 1159, 1161, 1163, 1167, 1169, 1171, 1173, 1175, 1177, 1179, 1181, 1183, 1185, 1187, 1189, 1191, 1193, 1195, 1197, 1199, 1201, 1203, 1205, 1207, 1209, 1211, 1213, 1215, 1217, 1219, 1221, 1223, 1225, 1227, 1229, 1254, 1256, 1258, 1260, 1262, and 1264.

18. The genome editing system of claim 17, wherein the Cpf1 variant comprises a sequence selected from the group consisting of SEQ ID NOs: 1000, 1001, 1008-1015, and 1035-39.

19. The genome editing system of claim 17, wherein the gRNA comprises a 2′-fluoro modification.

20. A method of altering a promoter of a gamma-globin (HBG) gene in a cell comprising:
contacting the cell with a genome editing system comprising:
a nucleic acid encoding a Cpf1 variant comprising one or more modifications selected from the group consisting of one or more mutations in a wild-type Cpf1 amino acid sequence, one or more nuclear localization signals, one or more purification tags, and a combination thereof, and
a guide (gRNA) comprising:
a 5′ end and a 3′ end,
a DNA extension at the 5′ end, wherein the DNA extension comprises a sequence selected from the group consisting of SEQ ID NOs: 1235-1250,
a targeting domain that is complementary to a target site in the promoter of the HBG gene, wherein the target site comprises nucleotides located between Chr 11 (NC_000011.10) 5,249,955-5,249,987; Chr 11 (NC_000011.10) 5,254,879-5,254,909; or a combination thereof, and
an RNA segment capable of associating with the Cpf1 variant.

21. The method of claim 20, wherein the targeting domain comprises a sequence selected from the group consisting of SEQ ID NOs: 1002, 1004, 1139, 1141, 1143, 1145, 1147, 1149, 1151, 1153, 1155, 1157, 1159, 1161, 1163, 1167, 1169, 1171, 1173, 1175, 1177, 1179, 1181, 1183, 1185, 1187, 1189, 1191, 1193, 1195, 1197, 1199, 1201, 1203, 1205, 1207, 1209, 1211, 1213, 1215, 1217, 1219, 1221, 1223, 1225, 1227, 1229, 1254, 1256, 1258, 1260, 1262, and 1264.

22. The method of claim 21, wherein the Cpf1 variant comprises a sequence selected from the group consisting of SEQ ID NOs: 1000, 1001, 1008-1015, and 1035-39.

23. The method of claim 21, wherein the human cell is a CD34+ cell or a hematopoietic stem cell.

24. The method of claim 21, wherein the gRNA comprises a 2′-fluoro modification.

25. The method of claim 21, wherein the genome editing system is delivered to the human cell using a lipid nanoparticle.

26. A method of increasing a level of fetal hemoglobin (HbF) in a human cell by genome editing using a genome editing system, the method comprising:
contacting the human cell with the genome editing system comprising:
a nucleic acid encoding a Cpf1 variant comprising one or more modifications selected from the group consisting of one or more mutations in a wild-type Cpf1 amino acid sequence, one or more nuclear localization signals, one or more purification tags, and a combination thereof, and
a guide (gRNA) comprising:
a 5′ end and a 3′ end,
a DNA extension at the 5′ end, wherein the DNA extension comprises a sequence selected from the group consisting of SEQ ID NOs: 1235-1250,
a targeting domain that is complementary to a target site in a promoter of a gamma-globin (HBG) gene, wherein the target site comprises nucleotides located between Chr 11 (NC_000011.10) 5,249,955-5,249,987; Chr 11 (NC_000011.10) 5,254,879-5,254,909; or a combination thereof, and
an RNA segment capable of associating with the Cpf1 variant to affect an alteration in the promoter of the HBG gene, thereby to increase expression of HbF.

27. The method of claim 26, wherein the targeting domain comprises a sequence selected from the group consisting of SEQ ID NOs: 1002, 1004, 1139, 1141, 1143, 1145, 1147, 1149, 1151, 1153, 1155, 1157, 1159, 1161, 1163, 1167, 1169, 1171, 1173, 1175, 1177, 1179, 1181, 1183, 1185, 1187, 1189, 1191, 1193, 1195, 1197, 1199, 1201, 1203, 1205, 1207, 1209, 1211, 1213, 1215, 1217, 1219, 1221, 1223, 1225, 1227, 1229, 1254, 1256, 1258, 1260, 1262, and 1264.

28. The method of claim 27, wherein the Cpf1 variant comprises a sequence selected from the group consisting of SEQ ID NOs: 1000, 1001, 1008-1015, and 1035-39.

29. The method of claim 27, wherein the cell is a CD34+ cell or a hematopoietic stem cell.

30. The method of claim 27, wherein the gRNA comprises a 2′-fluoro modification.

31. The method of claim 27, wherein the genome editing system is delivered to the cell using a lipid nanoparticle.

32. A method of alleviating one or more symptoms of sickle cell disease in a subject in need thereof, the method comprising:
modifying a population of CD34+ or hematopoietic stem cells of the subject by delivering a genome editing system to the population of cells, thereby affecting an alteration in a promoter of a gamma-globin (HBG) gene in one or more cells in the population, the genome editing system comprising:
a nucleic acid encoding a Cpf1 variant comprising one or more modifications selected from the group consisting of one or more mutations in a wild-type Cpf1 amino acid sequence, one or more nuclear localization signals, one or more purification tags, and a combination thereof, and
a guide (gRNA) comprising:
a 5′ end and a 3′ end,
a DNA extension at the 5′ end, wherein the DNA extension comprises a sequence selected from the group consisting of SEQ ID NOs: 1235-1250,
a targeting domain that is complementary to a target site in the promoter of the HBG gene, wherein the target site comprises nucleotides located between Chr 11 (NC_000011.10) 5,249,955-5,249,987; Chr 11 (NC_000011.10) 5,254,879-5,254,909; or a combination thereof,
thereby alleviating one or more symptoms of sickle cell disease in the subject.

33. The method of claim 32, wherein the targeting domain comprises a sequence selected from the group consisting of SEQ ID NOs: 1002, 1004, 1139, 1141, 1143, 1145, 1147, 1149, 1151, 1153, 1155, 1157, 1159, 1161, 1163, 1167, 1169, 1171, 1173, 1175, 1177, 1179, 1181, 1183, 1185, 1187, 1189, 1191, 1193, 1195, 1197, 1199, 1201, 1203, 1205, 1207, 1209, 1211, 1213, 1215, 1217, 1219, 1221, 1223, 1225, 1227, 1229, 1254, 1256, 1258, 1260, 1262, and 1264.

34. The method of claim 33, wherein the Cpf1 variant comprises a sequence selected from the group consisting of SEQ ID NOs: 1000, 1001, 1008-1015, and 1035-39.

35. The method of claim 33, wherein the gRNA comprises a 2′-fluoro modification.

36. The method of claim 33, wherein the genome editing system is delivered to the cell using a lipid nanoparticle.

37. A genome editing system comprising:
a nucleic acid encoding a Cpf1 variant comprising one or more modifications selected from the group consisting of one or more mutations in a wild-type Cpf1 amino acid sequence, one or more nuclear localization signals, one or more purification tags, and a combination thereof, wherein the Cpf1 variant comprises a sequence selected from the group consisting of SEQ ID NOs: 1000, 1001, 1008-1015, and 1035-39, and
a guide (gRNA) comprising:
a 5′ end and a 3′ end,
a DNA extension at the 5′ end, wherein the DNA extension comprises a sequence selected from the group consisting of SEQ ID NOs: 1235-1250,
a targeting domain that is complementary to a target site in a promoter of a gamma-globin (HBG) gene, wherein the targeting domain comprises a sequence selected from the group consisting of SEQ ID NOs: 1002, 1004, 1139, 1141, 1143, 1145, 1147, 1149, 1151, 1153, 1155, 1157, 1159, 1161, 1163, 1167, 1169, 1171, 1173, 1175, 1177, 1179, 1181, 1183, 1185, 1187, 1189, 1191, 1193, 1195, 1197, 1199, 1201, 1203, 1205, 1207, 1209, 1211, 1213, 1215, 1217, 1219, 1221, 1223, 1225, 1227, 1229, 1254, 1256, 1258, 1260, 1262, and 1264, and
an RNA segment capable of associating with the Cpf1 variant.

38. The genome editing system of claim 37, wherein the gRNA comprises a 2′-fluoro modification.

39. A method of altering a promoter of a gamma-globin (HBG) gene in a cell comprising:
contacting the cell with a genome editing system comprising:
a nucleic acid encoding a Cpf1 variant comprising one or more modifications selected from the group consisting of one or more mutations in a wild-type Cpf1 amino acid sequence, one or more nuclear localization signals, one or more purification tags, and a combination thereof, wherein the Cpf1 variant comprises a sequence selected from the group consisting of SEQ ID NOs: 1000, 1001, 1008-1015, and 1035-39, and
a guide (gRNA) comprising:
a 5′ end and a 3′ end,
a DNA extension at the 5′ end, wherein the DNA extension comprises a sequence selected from the group consisting of SEQ ID NOs: 1235-1250,
a targeting domain that is complementary to a target site in the promoter of the HBG gene, wherein the targeting domain comprises a sequence selected from the group consisting of SEQ ID NOs: 1002, 1004, 1139, 1141, 1143, 1145, 1147, 1149, 1151, 1153, 1155, 1157, 1159, 1161, 1163, 1167, 1169, 1171, 1173, 1175, 1177, 1179, 1181, 1183, 1185, 1187, 1189, 1191, 1193, 1195, 1197, 1199, 1201, 1203, 1205, 1207, 1209, 1211, 1213, 1215, 1217, 1219, 1221, 1223, 1225, 1227, 1229, 1254, 1256, 1258, 1260, 1262, and 1264, and
an RNA segment capable of associating with the Cpf1 variant.

40. The method of claim 39, wherein the cell is a CD34+ cell or a hematopoietic stem cell.

41. The method of claim 39, wherein the gRNA comprises a 2′-fluoro modification.

42. The method of claim 39, wherein the genome editing system is delivered to the cell using a lipid nanoparticle.

43. A method of increasing a level of fetal hemoglobin (HbF) in a human cell by genome editing using a genome editing system, the method comprising:
contacting the human cell with the genome editing system comprising:
a nucleic acid encoding a Cpf1 variant comprising one or more modifications selected from the group consisting of one or more mutations in a wild-type Cpf1 amino acid sequence, one or more nuclear localization signals, one or more purification tags, and a combination thereof, wherein the Cpf1 variant comprises a sequence selected from the group consisting of SEQ ID NOs: 1000, 1001, 1008-1015, and 1035-39, and
a guide (gRNA) comprising:
a 5′ end and a 3′ end,
a DNA extension at the 5′ end, wherein the DNA extension comprises a sequence selected from the group consisting of SEQ ID NOs: 1235-1250,
a targeting domain that is complementary to a target site in a promoter of a gamma-globin (HBG) gene, wherein the targeting domain comprises a sequence selected from the group consisting of SEQ ID NOs: 1002, 1004, 1139, 1141, 1143, 1145, 1147, 1149, 1151, 1153, 1155, 1157, 1159, 1161, 1163, 1167, 1169, 1171, 1173, 1175, 1177, 1179, 1181, 1183, 1185, 1187, 1189, 1191, 1193, 1195, 1197, 1199, 1201, 1203, 1205, 1207, 1209, 1211, 1213, 1215, 1217, 1219, 1221, 1223, 1225, 1227, 1229, 1254, 1256, 1258, 1260, 1262, and 1264, and
an RNA segment capable of associating with the Cpf1 variant to affect an alteration in the promoter of the HBG gene, thereby to increase expression of HbF.

44. The method of claim 43, wherein the human cell is a CD34+ cell or a hematopoietic stem cell.

45. The method of claim 43, wherein the gRNA comprises a 2′-fluoro modification.

46. The method of claim 43, wherein the genome editing system is delivered to the human cell using a lipid nanoparticle.

47. A method of alleviating one or more symptoms of sickle cell disease in a subject in need thereof, the method comprising:
modifying a population of CD34+ or hematopoietic stem cells of the subject by delivering a genome editing system to the population of cells, thereby affecting an alteration in a promoter of a gamma-globin (HBG) gene in one or more cells in the population, the genome editing system comprising:
a nucleic acid encoding a Cpf1 variant comprising one or more modifications selected from the group consisting of one or more mutations in a wild-type Cpf1 amino acid sequence, one or more nuclear localization signals, one or more purification tags, and a combination thereof, wherein the Cpf1 variant comprises a sequence selected from the group consisting of SEQ ID NOs: 1000, 1001, 1008-1015, and 1035-39, and
a guide (gRNA) comprising:
a 5′ end and a 3′ end,
a DNA extension at the 5′ end, wherein the DNA extension comprises a sequence selected from the group consisting of SEQ ID NOS: 1235-1250,
a targeting domain that is complementary to a target site in the promoter of the HBG gene, wherein the targeting domain comprises a sequence selected from the group consisting of SEQ ID NOs: 1002, 1004, 1139, 1141, 1143, 1145, 1147, 1149, 1151, 1153, 1155, 1157, 1159, 1161, 1163, 1167, 1169, 1171, 1173, 1175, 1177, 1179, 1181, 1183, 1185, 1187, 1189, 1191, 1193, 1195, 1197, 1199, 1201, 1203, 1205, 1207, 1209, 1211, 1213, 1215, 1217, 1219, 1221, 1223, 1225, 1227, 1229, 1254, 1256, 1258, 1260, 1262, and 1264,
thereby alleviating one or more symptoms of sickle cell disease in the subject.

48. The method of claim 47, wherein the gRNA comprises a 2′-fluoro modification.

49. The method of claim 47, wherein the genome editing system is delivered to the cell using a lipid nanoparticle.
